(19) United States
(12) Patent Application Publication
(10) Pub. No.: US 2013/0224116 A1
(43) Pub. Date: Aug. 29, 2013

(54) Markers of Endothelial Progenitor Cells and Uses Thereof

(71) Applicants: Claudine Sharon Bonder, Adelaide (AU); Angel Fransciso Lopez, Adelaide (AU); Gert Hoy Talbo, Bundoora (AU)

(72) Inventors: Claudine Sharon Bonder, Adelaide (AU); Angel Fransciso Lopez, Adelaide (AU); Gert Hoy Talbo, Bundoora (AU)

(73) Assignee: TransBio Ltd., Bundoora, Victoria (AU)

(21) Appl. No.: 13/882,806

(22) PCT Filed: Nov. 7, 2011
(86) PCT No.: PCT/AU2011/001415

§ 371 Date: May 1, 2013

Related U.S. Application Data
(60) Provisional application No. 61/410,674, filed on Nov. 5, 2010.

(51) Int. Cl. A61K 35/44; G01N 33/569; C07K 16/28; C12N 5/074; G01N 33/50; C12N 11/00; C12Q 1/37; C12Q 1/68

(52) U.S. Cl. CPC A61K 35/44; C12Q 1/37; G01N 33/56966; C12Q 1/6881; C12N 5/0692; G01N 33/5005; C12N 11/00; C07K 16/28
USPC 424/9.1; 435/23; 506/9; 435/7.21; 435/6.11; 435/7.92; 435/6.12; 435/325; 435/375; 435/29; 424/93.7; 435/174; 424/178.1; 530/387.9; 424/139.1

(57) ABSTRACT

The present invention provides markers of endothelial progenitor cells (EPCs) and use of those markers and reagents that bind thereto to detect EPC cells or diagnose, prognose, treat or prevent EPC-associated conditions.

### RELATED APPLICATION DATA

[0001] The present application claims priority from U.S. Patent Application No. 61/410,674 entitled “Markers of endothelial progenitor cells and uses thereof”. The entire contents of that application are hereby incorporated by reference.

### FIELD

[0002] The present invention relates to nucleic acid or protein markers of endothelial progenitor cells (EPCs) and uses thereof.

### SEQUENCE LISTING

[0003] A Sequence Listing of nucleotide and amino acid sequences referenced in this application as “SEQ ID NO: 1-340” is submitted in computer readable form along with this application. The computer readable form of the Sequence Listing is hereby incorporated by reference into this application.

### BACKGROUND

[0004] Various disorders are associated with insufficient neovascularization, e.g., ischemia or aberrant angiogenesis/vasculogenesis, e.g., cancer. In this regard, the skilled artisan will be aware that neovascularization encompasses angiogenesis and vasculogenesis. Angiogenesis is the growth of new blood vessels from pre-existing vessels. Angiogenesis can take two forms, i.e., sprouting angiogenesis is the formation of new vessels toward an angiogenic signal, and intussusceptive angiogenesis is the process by which a blood vessel is split into two new vessels. In contrast, vasculogenesis is the de novo formation of blood vessels by tissue resident endothelial progenitor cells (EPCs). EPCs are considered to play a role in both angiogenesis and vasculogenesis.

[0005] Various types of tissue resident or circulating blood cells can be induced to display endothelial characteristics and are referred to as EPCs. Two of the more commonly studied forms of EPCs are monocytic EPCs and hemangioblastic EPCs.

[0006] Monocytic EPCs are found in peripheral blood mononuclear cells (PBMCs) and in culture are capable of forming colonies of endothelial-like cells that augment neovascularization in animal models (Asahara et al., 1997). Monocytic EPCs can be obtained from blood and are potent secretors of angiogenic factors, indicating a role in promoting angiogenesis and endothelial repair through paracrine stimulation of resident endothelium (Rehman et al., 2007). Following culture of a mixed population of EPCs, monocytic EPCs give rise to “early outgrowth EPCs”, which possess only transient proliferation potential in vitro, cannot be passaged, express the monocytic marker CD14 and display overlap between endothelial and macrophage functions, e.g., phagocytosis, antithrombogenic activity and production of vasoactive substances (Krenning et al., 2009).

[0007] Hemangioblastic EPCs circulate in peripheral blood and are also detectable in bone marrow. These cells are also mobilized from bone marrow under conditions of hypoxia, e.g., during ischemia, or in response to hematopoietic stem cell mobilization, e.g., using granulocyte colony stimulating factor (G-CSF) (Kawamoto and Losordo, 2008; Liu et al., 2008). These cells undergo clonal expansion and give rise to “late outgrowth EPCs”. These cells are positive for CD34 (Krenning et al., 2009).

[0008] While monocytic EPCs and hemangioblastic EPCs arise from distinct lineages and show functional differences in vitro, both forms contribute to in vivo neovascularization in several disease models (Krenning et al., 2009). In this regard, EPCs have been shown to integrate into newly forming blood vessels (Asahara et al., 1997). In particular, injury or hypoxia induces production of factors such as vascular endothelial growth factor (VEGF) and/or monocyte chemotactic protein-1 (MCP-1), which result in break-down of extracellular matrix between endothelial cells in existing blood vessels facilitating extravasation of EPCs (particularly, monocytic EPCs). These EPCs secrete various proteases including matrix metalloproteases, matrix metalloelastases and elastases, which further degrade the endothelial extracellular matrix. The EPCs also form a network of tunnels that link to existing blood vessels. Hemangioblastic EPCs are recruited to and line the lumen of these tunnels. Both monocytic and hemangioblastic EPCs secrete high levels of pro-angiogenic cytokines, and the presence of both forms of EPCs results in a synergistic increase in these compounds. These cytokines are considered to cause differentiation of EPCs into mature endothelium and to recruit mature endothelial cells to form blood vessels (Krenning et al., 2009).

### EPCs and Autoimmune/Inflammatory/Rheumatic Diseases and Connective Tissue Disorders

[0009] EPC numbers and/or function have been shown to be aberrant in subjects suffering from a variety of disorders, such as cardiovascular disease, rheumatoid arthritis, psoriatic arthritis, systemic lupus erythematosus (SLE), systemic sclerosis and ANCA-associated vasculitis.

[0010] Subjects suffering from cardiovascular disease have reduced levels of hemangioblastic EPCs, and this reduction is associated with higher systolic blood pressure, higher low density lipoprotein (LDL) cholesterol levels, metabolic syndrome and coronary artery disease. Monocytic EPCs derived from subjects suffering from cardiovascular disease have a reduced capacity for outgrowth in vitro, which is associated with type I and type II diabetes, hypertension and renal insufficiency. Prospective data also shows an association between lower levels of hemangioblastic and monocytic EPCs with increased rates of cardiovascular disease (Westerweel and Verhaar, 2009).

[0011] Subjects suffering from rheumatoid arthritis have reduced levels of hemangioblastic and monocytic EPCs (Egan et al., 2008). Levels of hemangioblastic EPCs also show an inverse correlation with rheumatoid arthritis disease severity score, erythrocyte sedimentation rate and rheumatoid factor levels (Egan et al., 2008; Grisar et al., 2005). Monocytic EPCs from subjects suffering from rheumatoid arthritis also show reduced migratory response to VEGF, and serum from rheumatoid arthritis patients has been shown to inhibit migration of EPCs isolated from healthy controls (Herbrig et al., 2006).

[0012] Patients with SLE that show no overt or subclinical vascular disease or suffering from active SLE have reduced numbers of circulating hemangioblastic EPCs (Westerweel et al., 2007; Denny et al., 2007). The ability of monocytic EPCs from SLE patients to secrete pro-angiogenic factors and to form colonies when cultured in vitro have also been shown to be inhibited (Westerweel and Verhaar, 2009).

[0013] In systemic sclerosis, levels of hemangioblastic EPCs show a biomodal pattern with numbers increasing during the first five or so years after disease onset and then reducing to levels below those of healthy controls (Westerweel and Verhaar, 2009). Monocytic EPCs have also been found to be reduced in systemic sclerosis patients (Zhu et al., 2008).

[0014] EPC dysfunction has also been described in diabetes (Tepper et al., 2002). For example, hyperglycemia associated with diabetes has been shown to directly reduce EPC numbers (Ding and Triggle, 2005; Kang et al., 2009). Furthermore, a mouse model of diabetes was shown to have suppressed levels of EPC mobilization in response to ischemia (Kang et al., 2009).

[0015] As is apparent from the foregoing, various individual studies have found aberrant levels of EPCs in various disease states. However, many of these studies use different assays in an attempt to quantify EPC numbers, including detecting EPCs using antibodies against CD34 and/or VEGF receptor 2 (VEGFR2/KDR), neither of which is specific for EPCs. Furthermore, some researchers pre-culture mononuclear cells before surface marker analysis, which may affect EPC quantification. Other detection methods involve culturing isolated cells to form colony forming units (CFU) and/or double staining cultured cells with acetylated-LDL and Ulex europaeus I lectin. Both of these methods involve multiple steps and are difficult to reproduce between laboratories (Avouac et al., 2008). Accordingly, comparing data obtained from different laboratories is difficult. These difficulties have also hampered production of standardized assays for detecting, isolating or quantifying EPCs. It follows that there is a need in the art for methods that facilitate detection and/or quantification of EPCs in samples from subjects.

[0016] Studies using therapeutics of rheumatic disease have also shown that EPC numbers return to normal levels or close to normal levels following treatment, indicating that modulation of EPC numbers may also provide therapeutic benefit in these diseases (Avouac et al., 2008).

### EPCs and Vascular/Tissue Regeneration

[0017] EPC levels have been shown to increase at sites of ischemia, such as following a stroke or during ischemia following a transplant. Moreover, the number of circulating EPCs has been shown to be significantly higher in patients suffering from acute ischemic stroke than in at-risk control subjects, and the magnitude of this difference is directly related to positive clinical outcome (Yip et al., 2008). Sobrino et al. (2007) have also shown that the magnitude of EPC population size increase is associated with positive outcome three months after a stroke and reduced infarct growth and neurological impairment at days 7 and 90. Accordingly, methods that facilitate rapid determination of EPC numbers in a sample will permit prognosis of subjects suffering from ischemia and determination of suitable therapeutic options.

[0018] Animal studies have also shown that administration of EPC containing populations of cells can improve outcome after an ischemic event. For example, administration of CD34+ cells accelerated neovascularization in a cerebral ischemic zone 48 hours after stroke, increased neurogenesis and improved functional indexes in a mouse model (Taguchi et al., 2004). Bone marrow-derived cells and peripheral blood cells have also been shown to improve neurological function in mouse and rat models of cerebral ischemia (Zhang et al., 2002 and Ukai et al., 2007).

[0019] In preclinical studies, EPC-containing cell populations were found to contribute directly to blood vessel formation as well as significantly increase vascular density (angiogenesis) from endogenous endothelial cells. These data demonstrate that the administered cells promote neovascularization by endogenous tissue, e.g., by secretion of angiogenic factors (Young et al., 2007).

[0020] CD34 bone marrow-derived cells (which contain EPCs) have also been shown to improve ventricular ejection fraction, reduce infarct size and improve myocardial perfusion in human phase I and II clinical trials (Krenning et al., 2009).

[0021] Blood-derived angioblasts have also been shown to improve blood-flow in a mouse model of diabetes, thereby reducing the risk of diabetic wounds (Schatterman et al., 2000).

[0022] A disadvantage of all of the foregoing studies is that mixed populations of cells are administered to subjects. For example, administration of unselected bone marrow cells from an autologous source leads to an increased risk of graft-versus-host disease. Furthermore, administration of relatively uncharacterized mixed cell populations is undesirable from a human clinical perspective.

[0023] Another application of EPCs is in the construction of endothelial-coated vascular grafts. In this regard, the poor patency rate of bypass grafts has been largely attributed to thrombosis caused by delayed endothelialization of their lumen (Young et al., 2007). Autologous, vessel-derived endothelial cells have been used to seed these grafts. However, insufficient numbers of cells has limited the clinical utility of this approach (Young et al., 2007). A separate approach taken by Rotmans et al. (2006) was to coat vascular grafts with anti-CD34 antibodies to capture EPCs in circulation. This approach resulted in complete coverage of the grafts within three days of implantation. However, the authors observed a hyperplastic response, which they believe may have occurred because the anti-CD34 antibodies were not specific for EPCs and additionally captured CD34 non-endothelial cells which induced restenosis.

[0024] Increasing neovascularization using EPC-based treatments is also likely to provide therapeutic benefits in treatment of wounds, bone defects and hypertension and for improving tissue grafting. For example, increasing neovascularization results in increased delivery of oxygen, nutrients and components of the inflammatory response to regions requiring those factors.

### EPCs and Infection

[0025] EPC levels have also been shown to increase in subjects suffering from sepsis. For example, Becchi et al., (2008) found increased levels of circulating EPCs in subjects suffering from sepsis and that the number of EPCs detected is correlated with disease severity. Raffat et al., (2007) also found increased levels of circulating EPCs in subjects suffering from sepsis and that the number of EPCs detected is inversely correlated with survival.

### EPCs and Unregulated Angiogenesis

[0026] Unregulated or excessive angiogenesis is observed in a number of conditions, such as psoriasis, nephropathy, cancer and retinopathy (Gupta and Zhang, 2005).

[0027] In the case of cancer, increased levels of EPCs have been observed in subjects suffering from multiple myeloma (Zhang et al., 2005). Furthermore, Shaked et al. (2005) studied numerous mouse tumor models (transplanted versus spontaneous, solid versus leukemic, syngeneic Lewis lung carcinoma LL/2, nerythrolukemic, orthotopic human breast cancer MDA-MB-231 and human lymphoma) and showed a strong correlation between tumor growth and EPC numbers. The authors were also able to effectively define optimal anti-angiogenic therapy dosage based on EPC monitoring. These data indicate that methods and/or reagents which facilitate rapid and/or simple detection and/or quantification of EPCs will also facilitate diagnosis and/or prognosis of cancer and/or prediction of suitable therapy.

[0028] Progression of tumor growth and/or metastasis is/are angiogenesis dependent. For example, Folkman et al. (1971) showed that tumors cannot grow between 1 mm or 2 mm without new blood vessels. Some data indicate that marrow-derived endothelial progenitor cells can be mobilized and incorporated into new blood vessels (Rusinova et al., 2003).

[0029] Inhibitors of angiogenesis have also shown efficacy in the treatment of cancers as is exemplified by Bevacizumab (Avastin®, Genentech/Roche), a humanized antibody against VEGF (Zondor et al., 2004). Some advantages of angiogenesis-based treatments are:
[0030] A single vessel provides nutrition for thousands of tumor cells and has to be damaged at only one point to block blood flow;
[0031] Endothelial cells and endothelial progenitor cells are normal diploid cells that are unlikely to acquire genetic mutations that render them drug resistant; and
[0032] Blood flow, a surrogate marker for biological activity of a drug, is measurable in the clinic (Gupta and Zhang, 2005).

[0033] EPCs from subjects suffering from macular degeneration have also been shown to expand more rapidly than those from normal subjects. Anti-VEGF therapeutics, such as bevacizumab and ranibuzumab (Lucentis®) have also been shown to be useful for treating macular degeneration.

[0034] As discussed above, the markers currently used for EPCs are not sufficiently specific for those cells. Accordingly, drugs targeting those markers are not sufficiently specific to kill or inhibit EPCs for the treatment of conditions associated with uncontrolled angiogenesis, e.g., cancer. Moreover, drugs targeting such markers may target non-endothelial cell types, potentially leading to detrimental side-effects.

[0035] It will be apparent from the foregoing discussion that depletion of EPCs provides an attractive means for treating various conditions, e.g., cancer. However, as discussed above, insufficient markers that permit removal of EPCs has hampered therapeutic strategies targeting these cells. Accordingly, there is a need in the art for new markers, for example cell surface markers of EPCs that permit detection, isolation, removal or destruction of EPCs, e.g., for therapeutic and/or prophylactic purposes.

### SUMMARY

[0036] The inventors have produced EPCs by overexpressing the enzyme sphingosine kinase-1 (SK-1) in human umbilical cord vein endothelial cells (HUVECs) (Bonder et al., (2009). SK-1 is expressed at high levels and is responsible, at least in part, for maintaining an endothelial progenitor cell (EPC) phenotype, i.e., preventing the cells from differentiating into mature endothelial cells. Using these cells as a model for EPCs generally, the inventors identified proteins, such as cell surface proteins, upregulated in EPCs compared to other cells, such as endothelial cells.

[0037] The inventors have also isolated non-adherent CD133 expressing EPCs from umbilical cord blood and identified cell surface biomarkers that are expressed at increased levels on these cells compared to other cells, such as endothelial cells. The inventors have identified these markers using nucleic acid-based and proteomic-based approaches.

[0038] The inventors have also shown that a marker of EPCs (DSG2) is also expressed on vascular cells in vivo. DSG2 is also expressed on some melanoma cells, and the inventors have shown that by inhibiting DSG2 they can reduce tube formation when endothelial cells and melanoma cells are co-cultured.

[0039] Accordingly, an example of the present invention provides a method for detecting an EPC, the method comprising determining the level of expression of a nucleic acid or protein set forth in Table 1, or a nucleic acid or protein having at least about 70% identity thereto, in, on or secreted from a cell, wherein an increased level of expression of a nucleic acid or protein set forth in Table 1 or a nucleic acid or protein having at least about 70% identity thereto compared to another cell type is indicative of an EPC.

[0040] In one example, the nucleic acid or protein is expressed in, on or secreted from EPCs at a level at least 1.5 fold greater than in, on or secreted by human umbilical cord vascular endothelial cells (HUVECs), for example at a level at least 2 fold greater than in, on or secreted by HUVECs, such as at a level at least 3 or 4 or 5 fold greater than in, on or secreted by HUVECs.

[0041] For example, the nucleic acid or protein is expressed in, on or secreted by non-adherent CD133⁺ EPCs at a level at least 1.5 fold greater than in, on or secreted by HUVECs, for example, at a level at least 2 fold greater than in, on or secreted by HUVECs, such as at a level at least 3 or 4 or 5 fold greater than in, on or secreted by HUVECs.

[0042] For example, the nucleic acid or protein is expressed in, on or secreted from EPCs at a level at least 1.5 fold greater than in, on or secreted by HUVECs and the nucleic acid comprises a sequence set forth in any one of SEQ ID NOs: 15, 1, 17, 9, 13, 3, 5, 7, 11, 19, 21, 23, 25, 27, 29, 31, 33, 35, 37, 39, 41, 43, 45, 47, 49, 51, 53, 55, 57, 59, 61, 63, 65, 67, 69, 71, 73, 75, 77, 79, 81, 83, 85, 87, 89, 91, 93, 95, 97, 99, 101, 103, 105, 107, 109, 111, 113, 115, 117, 119, 121, 123, 125, 127, 129, 131, 133, 135, 137, 139, 141, 143, 145, 147, 149, 151, 153, 155, 157, 159, 161, 163, 237, 239, 241, 243, 245, 247, 249, 251, 253, 255, 257, 259, 265, 267, 269, 271, 273, 275, 277, 279, 281, 305, 307, 309, 311, 313, 315, 317, 319, 321, 323, 325 or 327 or a nucleic acid having at least about 70% identity thereto, or the protein comprises a sequence set forth in any one of SEQ ID NOs: 16, 2, 18, 10, 14, 4, 6, 8, 12, 20, 22, 24, 26, 28, 30, 32, 34, 36, 38, 40, 42, 44, 46, 48, 50, 52, 54, 56, 58, 60, 62, 64, 66, 68, 70, 72, 74, 76, 78, 80, 82, 84, 86, 88, 90, 92, 94, 96, 98, 100, 102, 104, 106, 108, 110, 112, 114, 116, 118, 120, 122, 124, 126, 128, 130, 132, 134, 136, 138, 140, 142, 144, 146, 148, 150, 152, 154, 156, 158, 160, 162, 164, 238, 240, 242, 244, 246, 248, 250, 252, 254, 256, 258, 260, 266, 268, 270, 272, 274, 276, 278, 280, 282, 306, 308, 310, 312, 314, 316, 318, 320, 322, 324, 326 or 328 or a protein having at least about 70% identity thereto.

[0043] For example, the nucleic acid or protein is expressed in, on or secreted by non-adherent CD133⁺ EPCs at a level at least 1.5 fold greater than in, on or secreted by HUVECs and the nucleic acid comprises a sequence set forth in any one of SEQ ID NOs: 15, 1, 17, 9, 13, 3, 5, 7, 11, 19, 21, 23, 25, 27, 29, 31, 33, 35, 37, 39, 41, 43, 45, 47, 49, 51, 53, 55, 57, 59, 61, 63, 65, 67, 69, 71, 73, 75, 77, 79, 81, 83, 85, 87, 89, 91, 93, 95, 97, 99, 101, 103, 105, 107, 109, 111, 113, 115, 117, 119, 121, 123, 125, 127, 129, 131, 133, 135, 137, 139, 141, 143, 145, 147, 149, 151, 153, 155, 157, 159, 161, 163 or 327 or a nucleic acid having at least about 70% identity thereto, or the protein comprises a sequence set forth in any one of SEQ ID NOs: 16, 2, 18, 10, 14, 4, 6, 8, 12, 20, 22, 24, 26, 28, 30, 32, 34, 36, 38, 40, 42, 44, 46, 48, 50, 52, 54, 56, 58, 60, 62, 64, 66, 68, 70, 72, 74, 76, 78, 80, 82, 84, 86, 88, 90, 92, 94, 96, 98, 100, 102, 104, 106, 108, 110, 112, 114, 116, 118, 120, 122, 124, 126, 128, 130, 132, 134, 136, 138, 140, 142, 144, 146, 148, 150, 152, 154, 156, 158, 160, 162, 164 or 328 or a protein having at least about 70% identity thereto.

[0044] For example, the nucleic acid or protein is expressed in, on or secreted from EPCs at a level at least 2 fold greater than in, on or secreted by HUVECs and the nucleic acid comprises a sequence set forth in any one of SEQ ID NOs: 15, 1, 17, 9, 13, 3, 5, 7, 19, 21, 23, 27, 29, 31, 33, 37, 39, 43, 45, 47, 49, 51, 53, 55, 57, 59, 61, 63, 65, 67, 69, 71, 73, 75, 77, 79, 81, 83, 85, 87, 93, 95, 97, 99, 101, 103, 105, 111, 113, 115, 117, 119, 121, 123, 125, 131, 133, 135, 137, 139, 141, 143, 145, 155, 159, 161, 163, 237, 239, 241, 243, 245, 247, 249, 251, 265, 305, 307, 309, 311 or 327 or a nucleic acid having at least about 70% identity thereto, or the protein comprises a sequence set forth in any one of SEQ ID NOs: 16, 2, 18, 10, 14, 4, 6, 8, 20, 22, 24, 28, 30, 32, 34, 38, 40, 44, 46, 48, 50, 52, 54, 56, 58, 60, 62, 64, 66, 68, 70, 72, 74, 76, 78, 80, 82, 84, 86, 88, 94, 96, 98, 100, 102, 104, 106, 112, 114, 116, 118, 120, 122, 124, 126, 132, 134, 136, 138, 140, 142, 144, 146, 156, 160, 162, 164, 238, 240, 242, 244, 246, 248, 250, 252, 266, 306, 308, 310, 312 or 328 or a protein having at least about 70% identity thereto.

[0045] For example, the nucleic acid or protein is expressed in, on or secreted from non-adherent CD133⁺ EPCs at a level at least 2 fold greater than in, on or secreted from HUVECs and the nucleic acid comprises a sequence set forth in any one of SEQ ID NOs: 15, 1, 17, 9, 13, 3, 5, 7, 19, 21, 23, 27, 29, 31, 33, 37, 39, 43, 45, 47, 49, 51, 53, 55, 57, 59, 61, 63, 65, 67, 69, 71, 73, 75, 77, 79, 81, 83, 85, 87, 93, 95, 97, 99, 101, 103, 105, 111, 113, 115, 117, 119, 121, 123, 125, 131, 133, 135, 137, 139, 141, 143, 145, 155, 159, 161, 163 or 327 or a nucleic acid having at least about 70% identity thereto, or the protein comprises a sequence set forth in any one of SEQ ID NOs: 16, 2, 18, 10, 14, 4, 6, 8, 20, 22, 24, 28, 30, 32, 34, 38, 40, 46, 48, 50, 52, 56, 58, 60, 62, 64, 66, 68, 70, 72, 74, 76, 78, 80, 82, 100, 104, 112, 114, 120, 122, 124, 126, 132, 134, 136, 138, 140, 162, 164, 238, 306 or 328 or a protein having at least about 70% identity thereto.

[0046] For example, the nucleic acid or protein is expressed in, on or secreted from EPCs at a level at least 3 fold greater than in, on or secreted by HUVECs and the nucleic acid comprises a sequence set forth in any one of SEQ ID NOs: 15, 1, 17, 9, 13, 3, 5, 7, 19, 21, 23, 27, 29, 31, 33, 37, 39, 43, 45, 47, 49, 51, 53, 55, 57, 59, 61, 63, 65, 67, 69, 71, 73, 75, 77, 79, 81, 83, 85, 87, 93, 95, 97, 99, 101, 103, 105, 111, 113, 115, 117, 119, 121, 123, 125, 131, 133, 135, 137, 139, 141, 143, 145, 155, 159, 161, 163 or 327 or a nucleic acid having at least about 70% identity thereto, or the protein comprises a sequence set forth in any one of SEQ ID NOs: 16, 2, 18, 10, 14, 4, 6, 8, 20, 22, 24, 28, 30, 32, 34, 38, 40, 44, 46, 48, 50, 52, 54, 56, 58, 60, 62, 64, 66, 68, 70, 72, 74, 76, 78, 80, 82, 84, 86, 88, 94, 96, 98, 100, 102, 104, 106, 112, 114, 116, 118, 120, 122, 124, 126, 132, 134, 136, 138, 140, 142, 144, 146, 156, 160, 162, 164 or 328 or a protein having at least about 70% identity thereto.

[0047] For example, the nucleic acid or protein is expressed in, on or secreted from non-adherent CD133⁺ EPCs at a level at least 3 fold greater than in, on or secreted from HUVECs and the nucleic acid comprises a sequence set forth in any one of SEQ ID NOs: 15, 1, 17, 9, 13, 3, 7, 19, 21, 23, 27, 29, 31, 33, 37, 39, 45, 47, 49, 51, 55, 57, 59, 61, 63, 65, 67, 69, 71, 73, 75, 77, 79, 81, 99, 103, 111, 113, 119, 121, 123, 125, 131, 133, 135, 137, 139, 161, 163, 237, 305 or 327 or a nucleic acid having at least about 70% identity thereto, or the protein comprises a sequence set forth in any one of SEQ ID NOs: 16, 2, 18, 10, 14, 4, 8, 18, 20, 22, 24, 28, 30, 32, 34, 38, 40, 46, 48, 50, 52, 56, 58, 60, 62, 64, 66, 68, 70, 72, 74, 76, 78, 80, 82, 100, 104, 112, 114, 120, 122, 124, 126, 132, 134, 136, 138, 140, 162, 164, 238, 306 or 328 or a protein having at least about 70% identity thereto.

[0048] For example, the nucleic acid or protein is expressed in, on or secreted from non-adherent CD133⁺ EPCs at a level at least 4 fold greater than in, on or secreted from HUVECs and the nucleic acid comprises a sequence set forth in any one of SEQ ID NOs: 15, 1, 17, 13, 7, 19, 21, 27, 29, 37, 39, 45, 47, 55, 57, 59, 61, 63, 65, 67, 69, 71, 73, 75, 77, 79, 99, 103, 111, 121, 123, 125, 131, 133, 135, 161, 163 or 327 or a nucleic acid having at least about 70% identity thereto, or the protein comprises a sequence set forth in any one of SEQ ID NOs: 16, 2, 18, 14, 8, 20, 22, 28, 30, 40, 46, 48, 56, 58, 60, 62, 64, 66, 68, 104, 122, 124, 126, 132, 134, 162, 164 or 328 or a protein having at least about 70% identity thereto.

[0049] For example, the nucleic acid or protein is expressed in, on or secreted from non-adherent CD133⁺ EPCs at a level at least 5 fold greater than in, on or secreted from HUVECs and the nucleic acid comprises a sequence set forth in any one of SEQ ID NOs: 15, 1, 7, 19, 27, 29, 39, 45, 47, 55, 57, 59, 61, 63, 65, 67, 103, 121, 123, 125, 131, 133, 161, 163 or 327 or a nucleic acid having at least about 70% identity thereto, or the protein comprises a sequence set forth in any one of SEQ ID NOs: 16, 2, 8, 28, 32, 36, 38, 46, 48, 50, 52, 54, 56, 58, 102, 104, 122, 124, 126, 132, 134, 162, 164 or 328 or a protein having at least about 70% identity thereto.

[0050] For example, the nucleic acid or protein is expressed in, on or secreted from non-adherent CD133⁺ EPCs at a level at least 6 fold greater than in, on or secreted from HUVECs and the nucleic acid comprises a sequence set forth in any one of SEQ ID NOs: 15, 1, 7, 19, 39, 45, 47, 55, 57, 59, 61, 63, 121, 123, 125, 133, 161, 163 or 327 or a nucleic acid having at least about 70% identity thereto, or the protein comprises a sequence set forth in any one of SEQ ID NOs: 16, 2, 8, 20, 40, 46, 48, 56, 58, 60, 62, 64, 122, 124, 126, 134, 162, 164 or 328 or a protein having at least about 70% identity thereto.

[0051] In one example, the method comprises determining the level of expression of a nucleic acid comprising the sequence of SEQ ID NO: 1, 3, 5, 7, 9, 11, 13, 15 or 17 or a nucleic acid having at least about 70% identity thereto, or comprising determining the level of expression of the protein encoded by the nucleic acid, the protein comprising the sequence of SEQ ID NO: 2, 4, 6, 8, 10, 12, 14, 16 or 18 or a protein having at least about 70% identity thereto.

[0052] In one example, the level of expression of the nucleic acid is assessed using a microarray.

[0053] In one example, a protein or nucleic acid has one or more (e.g., has all) of the following characteristics:
[0054] Is expressed on EPCs and has low, or undetectable expression on endothelial cells;
[0055] A protein is expressed on the cell surface; and
[0056] A protein contains a transmembrane domain.

[0057] In one example, the protein is selected from the group consisting of DSG2, EMB, EMR2, NKG7, ADCY7, SLC39A8, TM7SF3, NCSTN, SIRPB1, INSRR, PKD2L1, DPP6, LRRC33, SLC1A5 or the nucleic acid encodes one of the foregoing proteins.

[0058] In one example, the method comprises determining the level of expression of a nucleic acid comprising the sequence of SEQ ID NO: 15, 1, 17, 337, 9, 13, 3, 5, 177, 331, 233, 227, 193, 339 or 225 or a nucleic acid having at least about 70% identity thereto, or comprising determining the level of expression of the protein encoded by the nucleic acid, the protein comprising the sequence of SEQ ID NO: 16, 2, 18, 338, 10, 14, 4, 6, 178, 332, 234, 228, 194, 340 or 226 or a protein having at least about 70% identity thereto.

[0059] In one example, the method comprises determining the level of expression of a nucleic acid comprising the sequence of SEQ ID NO: 15 or a nucleic acid having at least about 70% identity thereto, or comprising determining the level of expression of the protein encoded by the nucleic acid, the protein comprising the sequence of SEQ ID NO: 16 or a protein having at least about 70% identity thereto.

[0060] In one example, the method comprises determining the level of expression of a nucleic acid comprising the sequence of SEQ ID NO: 17 or a nucleic acid having at least about 70% identity thereto, or comprising determining the level of expression of the protein encoded by the nucleic acid, the protein comprising the sequence of SEQ ID NO: 18 or a protein having at least about 70% identity thereto.

[0061] In one example, the method comprises determining the level of expression of a nucleic acid comprising the sequence of SEQ ID NO: 1 or a nucleic acid having at least about 70% identity thereto, or comprising determining the level of expression of the protein encoded by the nucleic acid, the protein comprising the sequence of SEQ ID NO: 2 or a protein having at least about 70% identity thereto.

[0062] Another example of the present disclosure provides a method for detecting an EPC comprising determining the level of expression of a protein that is a cell adhesion molecule or a nucleic acid encoding the protein as set forth in Table 2, or a nucleic acid or protein having at least about 70% identity thereto, in, on or secreted from a cell, wherein an increased level of expression of a nucleic acid or protein set forth in Table 2 or a nucleic acid or protein having at least about 70% identity thereto compared to another cell type is indicative of an EPC.

[0063] In one example, a method of the disclosure comprises determining the level of expression of a protein that is an immunoglobulin, cell adhesion protein comprising the sequence of SEQ ID NO: 2, 24 or 26 or a protein having at least about 70% identity thereto, or comprising determining the level of expression of a nucleic acid that encodes the protein, the nucleic acid comprising the sequence of SEQ ID NO: 1, 23 or or a nucleic acid having at least about 70% identity thereto.

[0064] A further example of the present disclosure provides a method for detecting an EPC comprising determining the level of expression of a transporter protein or a nucleic acid encoding the protein as set forth in Table 3, or a nucleic acid or protein having at least about 70% identity thereto, in, on or secreted from a cell, wherein an increased level of expression of a nucleic acid or protein set forth in Table 3 or a nucleic acid or protein having at least about 70% identity thereto compared to another cell type is indicative of an EPC.

[0065] Another example of the disclosure provides a method for detecting an EPC comprising determining the level of expression of a growth factor protein or a nucleic acid encoding the protein as set forth in Table 4, or a nucleic acid or protein having at least about 70% identity thereto, in, on or secreted from a cell, wherein an increased level of expression of a nucleic acid or protein set forth in Table 4 or a nucleic acid or protein having at least about 70% identity thereto compared to another cell type is indicative of an EPC.

[0066] A further example of the disclosure provides a method for detecting an EPC comprising determining the level of expression of a receptor protein or a nucleic acid encoding the protein as set forth in Table 5, or a nucleic acid or protein having at least about 70% identity thereto, in, on or secreted from a cell, wherein an increased level of expression of a nucleic acid or protein set forth in Table 5 or a nucleic acid or protein having at least about 70% identity thereto compared to another cell type is indicative of an EPC.

[0067] A still further example of the disclosure provides a method for detecting an EPC comprising determining the level of expression of an enzyme protein or a nucleic acid encoding the protein as set forth in Table 6, or a nucleic acid or protein having at least about 70% identity thereto, in, on or secreted from a cell, wherein an increased level of expression of a nucleic acid or protein set forth in Table 6 or a nucleic acid or protein having at least about 70% identity thereto compared to another cell type is indicative of an EPC.

[0068] In one example, a protein subject of any method of the present disclosure is a cell surface protein in, or secreted from an EPC.

[0069] In one example, the level of expression of the nucleic acid or protein is increased in/on an EPC compared to the level of expression of the nucleic acid or protein in/on an endothelial cell other than an EPC and, for example, in or on a vascular endothelial cell. In one example, the cell other than an EPC is an endothelial cell expressing CD34.

[0070] In one example, the level of expression of a protein set forth in any one of Tables 1-6, or a protein having at least about 70% identity thereto, in, on or secreted from the cell is determined. For example, the level of the protein is determined by contacting the cell with a compound that binds to said protein for a time and under conditions sufficient for a compound-protein complex to form and detecting the level of said complex, wherein the level of said complex is indicative of the level of said protein on said cell. In this respect, any compound that binds specifically to the protein is suitable for performance of a method of the disclosure.

[0071] Exemplary compounds include antibodies and polypeptides comprising an antigen binding domain of an antibody.

[0072] In one example, the method additionally comprises detecting a cell that expresses CD34 (for example, expressing a high level of CD34) and/or VEGFR2/KDR and/or CD133 and/or CD31. Alternatively, or in addition, the method additionally comprises removing cells or selecting against cells expressing CD144 (for example, high levels of CD144) and/or von Willebrand Factor (vWF) and/or endothelial nitric oxide synthase (eNOS) and/or Tie2.

[0073] In one example, the method is performed using a sample from a subject, e.g., a blood sample or fraction thereof (e.g., plasma or serum or buffy coat fraction or peripheral blood mononuclear cell fraction) or bone marrow or a fraction thereof or umbilical cord blood or a fraction thereof. Exemplary blood samples include samples from subjects treated to mobilize stem cells from bone marrow, e.g., with granulocyte colony stimulating factor. Alternatively, the method is performed using one or more isolated cells or a lysate or extract thereof.

[0074] In one example, the method is performed in vitro or ex vivo.

[0075] Another example of the present disclosure provides a method for isolating an EPC, the method comprising detecting an EPC by performing the method of the disclosure to detect an EPC and isolating the detected EPC.

[0076] Another example of the present disclosure provides a method for isolating a population of cells enriched for EPCs, the method comprising contacting a population of cells comprising EPCs with a compound that binds to a protein set forth in Table 1 or a protein having at least about 70% identity thereto for a time and under conditions sufficient for said compound to bind to a cell and isolating cells to which the compound is bound.

[0077] For example, the protein is expressed in, on or secreted from EPCs at a level at least 1.5 fold greater than in, on or secreted by human umbilical cord vascular endothelial cells (HUVECs), for example at a level at least 2 fold greater than in, on or secreted by HUVECs, such as at a level at least 3 or 4 or 5 fold greater than in, on or secreted by HUVECs.

[0078] For example, the protein is expressed in, on or secreted by non-adherent CD133⁺ EPCs at a level at least 1.5 fold greater than in, on or secreted by HUVECs, for example at a level at least 2 fold greater than in, on or secreted by HUVECs, such as at a level at least 3 or 4 or 5 fold greater than in, on or secreted by HUVECs.

[0079] For example, the protein is expressed in, on or secreted from EPCs at a level at least 1.5 fold greater than in, on or secreted by HUVECs and the protein comprises a sequence set forth in any one of SEQ ID NOs: 16, 2, 18, 10, 14, 4, 6, 8, 12, 20, 22, 24, 26, 28, 30, 32, 34, 36, 38, 40, 42, 44, 46, 48, 50, 52, 54, 56, 58, 60, 62, 64, 66, 68, 70, 72, 74, 76, 78, 80, 82, 84, 86, 88, 90, 92, 94, 96, 98, 100, 102, 104, 106, 108, 110, 112, 114, 116, 118, 120, 122, 124, 126, 128, 130, 132, 134, 136, 138, 140, 142, 144, 146, 148, 150, 152, 154, 156, 158, 160, 162, 164, 238, 240, 242, 244, 246, 248, 250, 252, 254, 256, 258, 260, 266, 268, 270, 272, 274, 276, 278, 280, 282, 306, 308, 310, 312, 314, 316, 318, 320, 322, 324, 326 or 328 or a protein having at least about 70% identity thereto.

[0080] For example, the protein is expressed in, on or secreted by non-adherent CD133⁺ EPCs at a level at least 1.5 fold greater than in, on or secreted by HUVECs and the protein comprises a sequence set forth in any one of SEQ ID NOs: 16, 2, 18, 10, 14, 4, 6, 8, 12, 20, 22, 24, 26, 28, 30, 32, 34, 36, 38, 40, 42, 44, 46, 48, 50, 52, 54, 56, 58, 60, 62, 64, 66, 68, 70, 72, 74, 76, 78, 80, 82, 84, 86, 88, 90, 92, 94, 96, 98, 100, 102, 104, 106, 108, 110, 112, 114, 116, 118, 120, 122, 124, 126, 128, 130, 132, 134, 136, 138, 140, 142, 144, 146, 148, 150, 152, 154, 156, 158, 160, 162, 164 or 328 or a protein having at least about 70% identity thereto.

[0081] For example, the protein is expressed in, on or secreted from EPCs at a level at least 2 fold greater than in, on or secreted by HUVECs and the protein comprises a sequence set forth in any one of SEQ ID NOs: 16, 2, 18, 10, 14, 4, 6, 8, 20, 22, 24, 28, 30, 32, 34, 38, 40, 44, 46, 48, 50, 52, 54, 56, 58, 60, 62, 64, 66, 68, 70, 72, 74, 76, 78, 80, 82, 84, 86, 88, 94, 96, 98, 100, 102, 104, 106, 112, 114, 116, 118, 120, 122, 124, 126, 132, 134, 136, 138, 140, 142, 144, 146, 156, 160, 162, 164, 238, 240, 242, 244, 246, 248, 250, 252, 266, 306, 308, 310, 312 or 328 or a protein having at least about 70% identity thereto.

[0082] For example, the protein is expressed in, on or secreted from non-adherent CD133⁺ EPCs at a level at least 2 fold greater than in, on or secreted from HUVECs and the protein comprises a sequence set forth in any one of SEQ ID NOs: 16, 2, 18, 10, 14, 4, 6, 8, 20, 22, 24, 28, 30, 32, 34, 38, 40, 44, 46, 48, 50, 52, 54, 56, 58, 60, 62, 64, 66, 68, 70, 72, 74, 76, 78, 80, 82, 84, 86, 88, 94, 96, 98, 100, 102, 104, 106, 112, 114, 116, 118, 120, 122, 124, 126, 132, 134, 136, 138, 140, 142, 144, 146, 156, 160, 162, 164, 238, 240, 242, 244, 246, 248, 250, 252, 266, 306, 308, 310, 312 or 328 or a protein having at least about 70% identity thereto.

[0083] For example, the protein is expressed in, on or secreted from EPCs at a level at least 3 fold greater than in, on or secreted by HUVECs and the protein comprises a sequence set forth in any one of SEQ ID NOs: 16, 2, 18, 10, 14, 4, 6, 8, 20, 22, 24, 28, 30, 32, 34, 38, 40, 46, 48, 50, 52, 56, 58, 60, 62, 64, 66, 68, 70, 72, 74, 76, 78, 80, 82, 100, 104, 112, 114, 120, 122, 124, 126, 132, 134, 136, 138, 140, 162, 164, 238, 306 or 328 or a protein having at least about 70% identity thereto.

[0084] For example, the protein is expressed in, on or secreted from non-adherent CD133⁺ EPCs at a level at least 3 fold greater than in, on or secreted from HUVECs and the protein comprises a sequence set forth in any one of SEQ ID NOs: 16, 2, 18, 10, 14, 4, 6, 8, 20, 22, 24, 28, 30, 32, 34, 38, 40, 44, 46, 48, 50, 52, 54, 56, 58, 60, 62, 64, 66, 68, 70, 72, 74, 76, 78, 80, 82, 84, 86, 88, 94, 96, 98, 100, 102, 104, 106, 112, 114, 116, 118, 120, 122, 124, 126, 132, 134, 136, 138, 140, 142, 144, 146, 156, 160, 162, 164 or 328 or a protein having at least about 70% identity thereto.

[0085] For example, the protein is expressed in, on or secreted from non-adherent CD133⁺ EPCs at a level at least 4 fold greater than in, on or secreted from HUVECs and the protein comprises a sequence set forth in any one of SEQ ID NOs: 16, 2, 18, 14, 8, 20, 22, 28, 30, 40, 46, 48, 56, 58, 60, 62, 64, 66, 68, 104, 122, 124, 126, 132, 134, 162, 164 or 328 or a protein having at least about 70% identity thereto.

[0086] For example, the protein is expressed in, on or secreted from non-adherent CD133⁺ EPCs at a level at least 5 fold greater than in, on or secreted from HUVECs and the protein comprises a sequence set forth in any one of SEQ ID NOs: 16, 2, 8, 28, 32, 36, 38, 46, 48, 50, 52, 54, 56, 58, 102, 104, 122, 124, 126, 132, 134, 162, 164 or 328 or a protein having at least about 70% identity thereto.

[0087] For example, the protein is expressed in, on or secreted from non-adherent CD133⁺ EPCs at a level at least 6 fold greater than in, on or secreted from HUVECs and the protein comprises a sequence set forth in any one of SEQ ID NOs: 16, 2, 8, 20, 40, 46, 48, 56, 58, 60, 62, 64, 122, 124, 126, 134, 162, 164 or 328 or a protein having at least about 70% identity thereto.

[0088] In one example, the level of expression is determined using a microarray.

[0089] In one example, a protein has one or more (e.g., has all) of the following characteristics:
[0090] Is expressed on EPCs and has low, or undetectable expression on endothelial cells;
[0091] A protein is expressed on the cell surface; and
[0092] A protein contains a transmembrane domain.

[0093] In one example, the protein is selected from the group consisting of DSG2, EMB, EMR2, NKG7, ADCY7, SLC39A8, TM7SF3, NCSTN, SIRPB1, INSRR, PKD2L1, DPP6, LRRC33 or SLC1A5.

[0094] In one example, the compound binds to a protein comprising the sequence of SEQ ID NO: 16, 2, 18, 338, 10, 14, 4, 6, 178, 332, 234, 228, 194, 340 or 226 or a protein having at least about 70% identity thereto.

[0095] In one example, compound binds to a protein comprising the sequence of SEQ ID NO: 16 or a protein having at least about 70% identity thereto.

[0096] In one example, the compound binds to protein comprising the sequence of SEQ ID NO: 18 or a protein having at least about 70% identity thereto.

[0097] In one example, the compound binds to a protein comprising the sequence of SEQ ID NO: 2 or a protein having at least about 70% identity thereto.

[0098] In one example, compound binds to a protein comprising the sequence of SEQ ID NO: 2, 4, 6, 8, 10, 12, 14, 16 or 18 or a protein having at least about 70% identity thereto.

[0099] In another example, the compound binds to a protein selected from the group consisting of a protein that is a cell adhesion protein as set forth in Table 2, a transporter protein as set forth in Table 3, a growth factor as set forth in Table 4, a receptor as set forth in Table 5 and an enzyme as set forth in Table 6.

[0100] In a further example, the protein is an immunoglobulin, cell adhesion protein comprising the sequence of SEQ ID NO: 2, 24 or 26 or a protein having at least about 70% identity thereto.

[0101] For example, the method comprises isolating cells to which the compound binds to an increased level compared to other cells in the population.

[0102] In an example, the compound that binds to the protein is an antibody or a polypeptide comprising an antigen binding domain of an antibody.

[0103] The skilled artisan will be aware of suitable methods for isolating cells making use of compounds that bind to proteins, such as fluorescence-activated cell sorting (FACS) or magnetic cell separation cell techniques, e.g., MACS or techniques using Dynabeads™.

[0104] In one example, the enriched population is isolated from a sample from a subject, e.g., as discussed herein in more detail. Accordingly, the present disclosure also encompasses a method additionally comprising providing or obtaining a sample from a subject. Such a sample may have been isolated previously from a subject, e.g., the method is performed in vitro or ex vivo. The population of cells can also be an isolated population of cells, e.g., produced using tissue culture techniques.

[0105] In one example, the method additionally comprises culturing the isolated cells, e.g., to increase the number of EPCs or to expand the EPCs. In one example, the EPCs express a nucleic acid or protein as set out in Table 1 after culturing, e.g., after a time sufficient for the cells to expand to a level sufficient or compatible for administration to a subject, such as at least about 3 days or 5 days or 7 days.

[0106] In another example, the method comprises determining the activity of an EPC, e.g., by performing a method known in the art and/or described herein, such as by determining the ability of the cells to form CFU and/or to take up acetylated-LDL and/or binding of Ulex europaeus lectin.

[0107] In an example, the method additionally comprises formulating the isolated EPCs with a pharmaceutically acceptable carrier to thereby produce a pharmaceutical composition.

[0108] In a further example, the method additionally comprises immobilizing the isolated EPCs and/or cells isolated therefrom on a solid or semi-solid matrix.

[0109] The present disclosure additionally provides a composition comprising a population of cells enriched for EPCs, wherein the EPCs are population is isolated by performing a method according to the present disclosure.

[0110] The present disclosure also provides a composition comprising a population of cells enriched for EPCs expressing one or more nucleic acids or proteins set forth in Table 1.

[0111] For example, the population is enriched for EPCs expressing a nucleic acid or protein at a level at least 1.5 fold greater than human umbilical cord vascular endothelial cells (HUVECs), for example at a level at least 2 fold greater than HUVECs, such as at a level at least 3 or 4 or 5 fold greater than HUVECs.

[0112] For example, the population is enriched for EPCs expressing a nucleic acid or protein expressed by non-adherent CD133⁺ EPCs at a level at least 1.5 fold greater than HUVECs, for example at a level at least 2 fold greater than HUVECs, such as at a level at least 3 or 4 or 5 fold greater than HUVECs.

[0113] For example, the population is enriched for EPCs expressing a nucleic acid or protein at a level at least 1.5 fold greater HUVECs and the nucleic acid comprises a sequence set forth in any one of SEQ ID NOs: 15, 1, 17, 9, 13, 3, 5, 7, 11, 19, 21, 23, 25, 27, 29, 31, 33, 35, 37, 39, 41, 43, 45, 47, 49, 51, 53, 55, 57, 59, 61, 63, 65, 67, 69, 71, 73, 75, 77, 79, 81, 83, 85, 87, 89, 91, 93, 95, 97, 99, 101, 103, 105, 107, 109, 111, 113, 115, 117, 119, 121, 123, 125, 127, 129, 131, 133, 135, 137, 139, 141, 143, 145, 147, 149, 151, 153, 155, 157, 159, 161, 163, 237, 239, 241, 243, 245, 247, 249, 251, 253, 255, 257, 259, 265, 267, 269, 271, 273, 275, 277, 279, 281, 305, 307, 309, 311, 313, 315, 317, 319, 321, 323, 325 or 327 or a nucleic acid having at least about 70% identity thereto, or the protein comprises a sequence set forth in any one of SEQ ID NOs: 16, 2, 18, 10, 14, 4, 6, 8, 12, 20, 22, 24, 26, 28, 30, 32, 34, 36, 38, 40, 42, 44, 46, 48, 50, 52, 54, 56, 58, 60, 62, 64, 66, 68, 70, 72, 74, 76, 78, 80, 82, 84, 86, 88, 90, 92, 94, 96, 98, 100, 102, 104, 106, 108, 110, 112, 114, 116, 118, 120, 122, 124, 126, 128, 130, 132, 134, 136, 138, 140, 142, 144, 146, 148, 150, 152, 154, 156, 158, 160, 162, 164, 238, 240, 242, 244, 246, 248, 250, 252, 254, 256, 258, 260, 266, 268, 270, 272, 274, 276, 278, 280, 282, 306, 308, 310, 312, 314, 316, 318, 320, 322, 324, 326 or 328 or a protein having at least about 70% identity thereto.

[0114] For example, the population is enriched for EPCs expressing a nucleic acid or protein expressed by non-adherent CD133⁺ EPCs at a level at least 1.5 fold greater than HUVECs and the nucleic acid comprises a sequence set forth in any one of SEQ ID NOs: 15, 1, 17, 9, 13, 3, 5, 7, 11, 19, 21, 23, 25, 27, 29, 31, 33, 35, 37, 39, 41, 43, 45, 47, 49, 51, 53, 55, 57, 59, 61, 63, 65, 67, 69, 71, 73, 75, 77, 79, 81, 83, 85, 87, 89, 91, 93, 95, 97, 99, 101, 103, 105, 107, 109, 111, 113, 115, 117, 119, 121, 123, 125, 127, 129, 131, 133, 135, 137, 139, 141, 143, 145, 147, 149, 151, 153, 155, 157, 159, 161, 163 or 327 or a nucleic acid having at least about 70% identity thereto, or the protein comprises a sequence set forth in any one of SEQ ID NOs: 16, 2, 18, 10, 14, 4, 6, 8, 12, 20, 22, 24, 26, 28, 30, 32, 34, 36, 38, 40, 42, 44, 46, 48, 50, 52, 54, 56, 58, 60, 62, 64, 66, 68, 70, 72, 74, 76, 78, 80, 82, 84, 86, 88, 90, 92, 94, 96, 98, 100, 102, 104, 106, 108, 110, 112, 114, 116, 118, 120, 122, 124, 126, 128, 130, 132, 134, 136, 138, 140, 142, 144, 146, 148, 150, 152, 154, 156, 158, 160, 162, 164 or 328 or a protein having at least about 70% identity thereto.

[0115] For example, the population is enriched for EPCs expressing a nucleic acid or protein at a level at least 2 fold greater HUVECs and the nucleic acid comprises a sequence set forth in any one of SEQ ID NOs: 15, 1, 17, 9, 13, 3, 5, 7, 19, 21, 23, 27, 29, 31, 33, 37, 39, 43, 45, 47, 49, 51, 53, 55, 57, 59, 61, 63, 65, 67, 69, 71, 73, 75, 77, 79, 81, 83, 85, 87, 93, 95, 97, 99, 101, 103, 105, 111, 113, 115, 117, 119, 121, 123, 125, 131, 133, 135, 137, 139, 141, 143, 145, 155, 159, 161, 163, 237, 239, 241, 243, 245, 247, 249, 251, 265, 305, 307, 309, 311 or 327 or a nucleic acid having at least about 70% identity thereto, or the protein comprises a sequence set forth in any one of SEQ ID NOs: 16, 2, 18, 10, 14, 4, 6, 8, 20, 22, 24, 28, 30, 32, 34, 38, 40, 44, 46, 48, 50, 52, 54, 56, 58, 60, 62, 64, 66, 68, 70, 72, 74, 76, 78, 80, 82, 84, 86, 88, 94, 96, 98, 100, 102, 104, 106, 112, 114, 116, 118, 120, 122, 124, 126, 132, 134, 136, 138, 140, 142, 144, 146, 156, 160, 162, 164, 238, 240, 242, 244, 246, 248, 250, 252, 266, 306, 308, 310, 312 or 328 or a protein having at least about 70% identity thereto.

[0116] For example, the population is enriched for EPCs expressing a nucleic acid or protein expressed by non-adherent CD133⁺ EPCs at a level at least 2 fold greater than HUVECs and the nucleic acid comprises a sequence set forth in any one of SEQ ID NOs: 15, 1, 17, 9, 13, 3, 5, 7, 11, 19, 21, 23, 27, 29, 31, 33, 37, 39, 43, 45, 47, 49, 51, 53, 55, 57, 59, 61, 63, 65, 67, 69, 71, 73, 75, 77, 79, 81, 83, 85, 87, 93, 95, 97, 99, 101, 103, 105, 111, 113, 115, 117, 119, 121, 123, 125, 131, 133, 135, 137, 139, 141, 143, 145, 155, 159, 161, 163 or 327 or a nucleic acid having at least about 70% identity thereto, or the protein comprises a sequence set forth in any one of SEQ ID NOs: 16, 2, 18, 10, 14, 4, 6, 8, 20, 22, 24, 28, 30, 32, 34, 38, 40, 46, 48, 50, 52, 56, 58, 60, 62, 64, 66, 68, 70, 72, 74, 76, 78, 80, 82, 100, 104, 112, 114, 120, 122, 124, 126, 132, 134, 136, 138, 140, 162, 164, 238, 306 or 328 or a protein having at least about 70% identity thereto.

[0117] For example, the population is enriched for EPCs expressing a nucleic acid or protein at a level at least 3 fold greater HUVECs and the nucleic acid comprises a sequence set forth in any one of SEQ ID NOs: 15, 1, 17, 9, 13, 3, 5, 7, 19, 21, 23, 27, 29, 31, 33, 37, 39, 43, 45, 47, 49, 51, 53, 55, 57, 59, 61, 63, 65, 67, 69, 71, 73, 75, 77, 79, 81, 83, 85, 87, 93, 95, 97, 99, 101, 103, 105, 111, 113, 115, 117, 119, 121, 123, 125, 131, 133, 135, 137, 139, 141, 143, 145, 155, 159, 161, 163 or 327 or a nucleic acid having at least about 70% identity thereto, or the protein comprises a sequence set forth in any one of SEQ ID NOs: 16, 2, 18, 10, 14, 4, 6, 8, 20, 22, 24, 28, 30, 32, 34, 38, 40, 44, 46, 48, 50, 52, 54, 56, 58, 60, 62, 64, 66, 68, 70, 72, 74, 76, 78, 80, 82, 84, 86, 88, 94, 96, 98, 100, 102, 104, 106, 112, 114, 116, 118, 120, 122, 124, 126, 132, 134, 136, 138, 140, 142, 144, 146, 156, 160, 162, 164 or 328 or a protein having at least about 70% identity thereto.

[0118] For example, the population is enriched for EPCs expressing a nucleic acid or protein expressed by non-adherent CD133⁺ EPCs at a level at least 3 fold greater than HUVECs and the nucleic acid comprises a sequence set forth in any one of SEQ ID NOs: 15, 1, 17, 9, 13, 3, 7, 19, 21, 23, 27, 29, 31, 33, 37, 39, 45, 47, 49, 51, 55, 57, 59, 61, 63, 65, 67, 69, 71, 73, 75, 77, 79, 81, 99, 103, 111, 113, 119, 121, 123, 125, 131, 133, 135, 137, 139, 161, 163, 237, 305 or 327 or a nucleic acid having at least about 70% identity thereto, or the protein comprises a sequence set forth in any one of SEQ ID NOs: 16, 2, 18, 10, 14, 4, 8, 18, 20, 22, 24, 28, 30, 32, 34, 38, 40, 46, 48, 50, 52, 56, 58, 60, 62, 64, 66, 68, 70, 72, 74, 76, 78, 80, 82, 100, 104, 112, 114, 120, 122, 124, 126, 132, 134, 136, 138, 140, 162, 164, 238, 306 or 328 or a protein having at least about 70% identity thereto.

[0119] For example, the population is enriched for EPCs expressing a nucleic acid or protein expressed by non-adherent CD133⁺ EPCs at a level at least 4 fold greater than HUVECs and the nucleic acid comprises a sequence set forth in any one of SEQ ID NOs: 15, 1, 17, 13, 7, 19, 21, 27, 29, 37, 39, 45, 47, 55, 57, 59, 61, 63, 65, 67, 69, 71, 73, 75, 77, 79, 99, 103, 111, 121, 123, 125, 131, 133, 135, 161, 163 or 327 or a nucleic acid having at least about 70% identity thereto, or the protein comprises a sequence set forth in any one of SEQ ID NOs: 16, 2, 18, 14, 8, 20, 22, 28, 30, 40, 46, 48, 56, 58, 60, 62, 64, 66, 68, 104, 122, 124, 126, 132, 134, 162, 164 or 328 or a protein having at least about 70% identity thereto.

[0120] For example, the population is enriched for EPCs expressing a nucleic acid or protein expressed by non-adherent CD133⁺ EPCs at a level at least 5 fold greater than HUVECs and the nucleic acid comprises a sequence set forth in any one of SEQ ID NOs: 15, 1, 7, 19, 27, 29, 39, 45, 47, 55, 57, 59, 61, 63, 65, 67, 103, 121, 123, 125, 131, 133, 161, 163 or 327 or a nucleic acid having at least about 70% identity thereto, or the protein comprises a sequence set forth in any one of SEQ ID NOs: 16, 2, 8, 28, 32, 36, 38, 46, 48, 50, 52, 54, 56, 58, 102, 104, 122, 124, 126, 132, 134, 162, 164 or 328 or a protein having at least about 70% identity thereto.

[0121] For example, the population is enriched for EPCs expressing a nucleic acid or protein expressed by non-adherent CD133⁺ EPCs at a level at least 6 fold greater than HUVECs and the nucleic acid comprises a sequence set forth in any one of SEQ ID NOs: 15, 1, 7, 19, 39, 45, 47, 55, 57, 59, 61, 63, 121, 123, 125, 133, 161, 163 or 327 or a nucleic acid having at least about 70% identity thereto, or the protein comprises a sequence set forth in any one of SEQ ID NOs: 16, 2, 8, 20, 40, 46, 48, 56, 58, 60, 62, 64, 122, 124, 126, 134, 162, 164 or 328 or a protein having at least about 70% identity thereto.

[0122] In one example, the level of expression is determined using a microarray.

[0123] In one example, a protein or nucleic acid has one or more (e.g., has all) of the following characteristics:
[0124] Is expressed on EPCs and has low, or undetectable expression on endothelial cells;
[0125] A protein is expressed on the cell surface; and
[0126] A protein contains a transmembrane domain.

[0127] In one example, the protein is selected from the group consisting of DSG2, EMB, EMR2, NKG7, ADCY7, SLC39A8, TM7SF3, NCSTN, SIRPB1, INSRR, PKD2L1, DPP6, LRRC33 or SLC1A5 or the nucleic acid encodes one of the foregoing proteins.

[0128] In one example, the population is enriched for EPCs expressing a nucleic acid comprising the sequence of SEQ ID NO: 15, 1, 17, 337, 9, 13, 3, 5, 177, 331, 233, 227, 193, 339 or 225 or a nucleic acid having at least about 70% identity thereto, or a protein comprising the sequence of SEQ ID NO: 16, 2, 18, 338, 10, 14, 4, 6, 178, 332, 234, 228, 194, 340 or 226 or a protein having at least about 70% identity thereto.

[0129] In one example, the population is enriched for EPCs expressing a nucleic acid comprising the sequence of SEQ ID NO: 15 or a nucleic acid having at least about 70% identity thereto, or comprising determining the level of expression of the protein encoded by the nucleic acid, the protein comprising the sequence of SEQ ID NO: 16 or a protein having at least about 70% identity thereto.

[0130] In one example, the population is enriched for EPCs expressing a nucleic acid comprising the sequence of SEQ ID NO: 17 or a nucleic acid having at least about 70% identity thereto, or comprising determining the level of expression of the protein encoded by the nucleic acid, the protein comprising the sequence of SEQ ID NO: 18 or a protein having at least about 70% identity thereto.

[0131] In one example, the population is enriched for EPCs expressing a nucleic acid comprising the sequence of SEQ ID NO: 1 or a nucleic acid having at least about 70% identity thereto, or a protein encoded by the nucleic acid, the protein comprising the sequence of SEQ ID NO: 2 or a protein having at least about 70% identity thereto.

[0132] In one example, the population is enriched for EPCs expressing a protein comprising the sequence of SEQ ID NO: 2, 4, 6, 8, 10, 12, 14, 16 or 18 or a protein having at least about 70% identity thereto or a nucleic acid comprising the sequence of SEQ ID NO: 1, 3, 5, 7, 9, 11, 13, 15 or 17 or a nucleic acid having at least about 70% identity thereto.

[0133] In another example, the population is enriched for EPCs expressing a protein selected from the group consisting of a protein that is a cell adhesion protein as set forth in Table 2, a transporter protein as set forth in Table 3, a growth factor as set forth in Table 4, a receptor as set forth in Table 5 and an enzyme as set forth in Table 6 or a nucleic acid encoding any of the foregoing proteins.

[0134] In a further example, the population is enriched for EPCs expressing a protein that is an immunoglobulin, cell adhesion protein comprising the sequence of SEQ ID NO: 2, 24 or 26 or a protein having at least about 70% identity thereto, or the nucleic acid encodes the immunoglobulin, cell adhesion protein and comprises the sequence of SEQ ID NO: 1, 23 or 25 or a nucleic acid having at least about 70% identity thereto.

[0135] In one example, the EPCs express one or more proteins selected from the group consisting of CD133, CD117, CD34 and CD31.

[0136] In one example, the present disclosure provides a population of cells enriched for EPCs expressing DSG2 and one or more proteins selected from the group consisting of CD133, CD117, CD34 and CD31. In one example, the present disclosure provides a population of cells enriched for EPCs expressing DSG2, CD133, and CD117. In one example, the present disclosure provides a population of cells enriched for EPCs expressing DSG2, CD133, CD117, CD34 and CD31.

[0137] The skilled artisan will appreciate that a method for identifying EPCs in a sample from a subject is useful for diagnosing or prognosing a condition associated with EPCs, e.g., by assessing the number and/or activity of EPCs in the sample. Such assessment can be made using standard techniques, e.g., FACS, MACS, immunohistochemistry or immunofluorescence or activity assays described above. Accordingly, an example of the present disclosure provides a method for diagnosing and/or prognosing an EPC-associated condition in a subject, comprising performing a method of the disclosure to detect an EPC in a sample from a subject and/or performing a method of the disclosure to determine the activity of an EPC in a sample from a subject wherein detection of EPC(s) and/or EPC activity or failure to detect EPCs and/or EPC activity is diagnostic or prognostic of the EPC-associated condition.

[0138] In one example, the method comprises:
[0139] (i) determining or estimating the number of EPCs in the sample or determining or estimating EPC activity in the sample;
[0140] (ii) comparing the number of EPCs or EPC activity at (i) to the number of EPCs or EPC activity in a sample from a normal and/or healthy subject;
   wherein an increased or decreased number of EPCs or increased or decreased EPC activity at (i) compared to the number or activity of EPCs in a sample from the normal and/or healthy subject is diagnostic or prognostic of the EPC-associated condition.

[0141] In one example, the subject is receiving treatment for the condition and wherein:
[0142] (a) a similar number of EPCs or EPC activity at (i) compared to the number or activity of EPCs in a sample from a normal and/or healthy subject indicates that the subject is responding to treatment for the EPC-associated condition;
[0143] (b) an increased or decreased number of EPCs or EPC activity at (i) compared to the number or activity of EPCs in a sample from a normal and/or healthy subject indicates that the subject is not responding to treatment for the EPC-associated condition;
[0144] (c) an increased or decreased number or activity of EPCs compared to the number or activity of EPCs in a sample from the subject prior to treatment indicates that the subject is responding to treatment for the EPC-associated condition; or
[0145] (d) a similar number or activity of EPCs at (i) compared to the number or activity of EPCs in a sample from the subject prior to treatment indicates that the subject is not responding to treatment for the EPC-associated condition.

[0146] In one example, the method comprises contacting a sample with a compound that binds to a protein set forth in Table 1 for a time and under conditions sufficient for the compound to bind to a cell expressing the protein and determining the number of cells to which the compound has bound. For example, the compound is labeled with a detectable marker to facilitate detection. Exemplary compounds include antibodies and polypeptides comprising an antigen binding domain of an antibody.

[0147] The skilled artisan will also appreciate that the provision of markers of EPCs provides the basis for methods for diagnosing and/or prognosing an EPC-associated condition without necessarily assessing the number of cells in a sample, e.g., by detecting the level of the marker(s) in a sample, e.g., using an immunoassay.

[0148] Accordingly, the present disclosure additionally provides a method for diagnosing and/or prognosing an EPC-associated condition in a subject, the method comprising:
[0149] (i) detecting the level of a nucleic acid or protein set forth in Table 1 or a nucleic acid or protein having at least about 70% identity thereto in a sample from a subject;
[0150] (ii) comparing the level at (i) to the level of the nucleic acid or protein in a normal and/or healthy subject,
   wherein an increased level of the nucleic acid or protein at (i) compared to the level in the normal and/or healthy subject is diagnostic or prognostic of the EPC-associated condition.

[0151] For example, the method comprises detecting the level of a protein set forth in Table 1.

[0152] In one example, the subject is receiving treatment for said condition and wherein
[0153] (a) a similar level of the nucleic acid or protein at (i) compared to the level of the nucleic acid or protein in a sample from a normal and/or healthy subject indicates that the subject is responding to treatment for the EPC-associated condition;
[0154] (b) an increased or decreased level of the nucleic acid or protein at (i) compared to the level of the nucleic acid or protein in a sample from a normal and/or healthy subject indicates that the subject is not responding to treatment for the EPC-associated condition;
[0155] (c) an increased or decreased level of the nucleic acid or protein compared to the level of the nucleic acid or protein in a sample from the subject prior to treatment indicates that the subject is responding to treatment for the EPC-associated condition; or
[0156] (iv) a similar level of the nucleic acid or protein at (i) compared to the level of the nucleic acid or protein in a sample from the subject prior to treatment indicates that the subject is not responding to treatment for the EPC-associated condition.

[0157] In one example, the method comprises contacting a sample with a compound that binds to a protein set forth in Table 1 for a time and under conditions sufficient for a compound-protein complex to form and determining the level of the complex. For example, the compound is labeled with a detectable marker to facilitate detection.

[0158] For example, the nucleic acid or protein is expressed in, on or secreted from EPCs at a level at least 1.5 fold greater than in, on or secreted by human umbilical cord vascular endothelial cells (HUVECs), for example at a level at least 2 fold greater than in, on or secreted by HUVECs, such as at a level at least 3 or 4 or 5 fold greater than in, on or secreted by HUVECs.

[0159] For example, the nucleic acid or protein is expressed in, on or secreted by non-adherent CD133⁺ EPCs at a level at least 1.5 fold greater than in, on or secreted by HUVECs, for example, at a level at least 2 fold greater than in, on or secreted by HUVECs, such as at a level at least 3 or 4 or 5 fold greater than in, on or secreted by HUVECs.

[0160] For example, the nucleic acid or protein is expressed in, on or secreted from EPCs at a level at least 1.5 fold greater than in, on or secreted by HUVECs and the nucleic acid comprises a sequence set forth in any one of SEQ ID NOs: 15, 1, 17, 9, 13, 3, 5, 7, 11, 19, 21, 23, 25, 27, 29, 31, 33, 35, 37, 39, 41, 43, 45, 47, 49, 51, 53, 55, 57, 59, 61, 63, 65, 67, 69, 71, 73, 75, 77, 79, 81, 83, 85, 87, 89, 91, 93, 95, 97, 99, 101, 103, 105, 107, 109, 111, 113, 115, 117, 119, 121, 123, 125, 127, 129, 131, 133, 135, 137, 139, 141, 143, 145, 147, 149, 151, 153, 155, 157, 159, 161, 163, 237, 239, 241, 243, 245, 247, 249, 251, 253, 255, 257, 259, 265, 267, 269, 271, 273, 275, 277, 279, 281, 305, 307, 309, 311, 313, 315, 317, 319, 321, 323, 325 or 327 or a nucleic acid having at least about 70% identity thereto, or the protein comprises a sequence set forth in any one of SEQ ID NOs: 16, 2, 18, 10, 14, 4, 6, 8, 12, 20, 22, 24, 26, 28, 30, 32, 34, 36, 38, 40, 42, 44, 46, 48, 50, 52, 54, 56, 58, 60, 62, 64, 66, 68, 70, 72, 74, 76, 78, 80, 82, 84, 86, 88, 90, 92, 94, 96, 98, 100, 102, 104, 106, 108, 110, 112, 114, 116, 118, 120, 122, 124, 126, 128, 130, 132, 134, 136, 138, 140, 142, 144, 146, 148, 150, 152, 154, 156, 158, 160, 162, 164, 238, 240, 242, 244, 246, 248, 250, 252, 254, 256, 258, 260, 266, 268, 270, 272, 274, 276, 278, 280, 282, 306, 308, 310, 312, 314, 316, 318, 320, 322, 324, 326 or 328 or a protein having at least about 70% identity thereto.

[0161] For example, the nucleic acid or protein is expressed in, on or secreted by non-adherent CD133⁺ EPCs at a level at least 1.5 fold greater than in, on or secreted by HUVECs and the nucleic acid comprises a sequence set forth in any one of SEQ ID NOs: 15, 1, 17, 9, 13, 3, 5, 7, 11, 19, 21, 23, 25, 27, 29, 31, 33, 35, 37, 39, 41, 43, 45, 47, 49, 51, 53, 55, 57, 59, 61, 63, 65, 67, 69, 71, 73, 75, 77, 79, 81, 83, 85, 87, 89, 91, 93, 95, 97, 99, 101, 103, 105, 107, 109, 111, 113, 115, 117, 119, 121, 123, 125, 127, 129, 131, 133, 135, 137, 139, 141, 143, 145, 147, 149, 151, 153, 155, 157, 159, 161, 163 or 327 or a nucleic acid having at least about 70% identity thereto, or the protein comprises a sequence set forth in any one of SEQ ID NOs: 16, 2, 18, 10, 14, 4, 6, 8, 12, 20, 22, 24, 26, 28, 30, 32, 34, 36, 38, 40, 42, 44, 46, 48, 50, 52, 54, 56, 58, 60, 62, 64, 66, 68, 70, 72, 74, 76, 78, 80, 82, 84, 86, 88, 90, 92, 94, 96, 98, 100, 102, 104, 106, 108, 110, 112, 114, 116, 118, 120, 122, 124, 126, 128, 130, 132, 134, 136, 138, 140, 142, 144, 146, 148, 150, 152, 154, 156, 158, 160, 162, 164 or 328 or a protein having at least about 70% identity thereto.

[0162] For example, the nucleic acid or protein is expressed in, on or secreted from EPCs at a level at least 2 fold greater than in, on or secreted by HUVECs and the nucleic acid comprises a sequence set forth in any one of SEQ ID NOs: 15, 1, 17, 9, 13, 3, 5, 7, 19, 21, 23, 27, 29, 31, 33, 37, 39, 43, 45, 47, 49, 51, 53, 55, 57, 59, 61, 63, 65, 67, 69, 71, 73, 75, 77, 79, 81, 83, 85, 87, 93, 95, 97, 99, 101, 103, 105, 111, 113, 115, 117, 119, 121, 123, 125, 131, 133, 135, 137, 139, 141, 143, 145, 155, 159, 161, 163, 237, 239, 241, 243, 245, 247, 249, 251, 265, 305, 307, 309, 311 or 327 or a nucleic acid having at least about 70% identity thereto, or the protein comprises a sequence set forth in any one of SEQ ID NOs: 16, 2, 18, 10, 14, 4, 6, 8, 20, 22, 24, 28, 30, 32, 34, 38, 40, 44, 46, 48, 50, 52, 54, 56, 58, 60, 62, 64, 66, 68, 70, 72, 74, 76, 78, 80, 82, 84, 86, 88, 94, 96, 98, 100, 102, 104, 106, 112, 114, 116, 118, 120, 122, 124, 126, 132, 134, 136, 138, 140, 142, 144, 146, 156, 160, 162, 164, 238, 240, 242, 244, 246, 248, 250, 252, 266, 306, 308, 310, 312 or 328 or a protein having at least about 70% identity thereto.

[0163] For example, the nucleic acid or protein is expressed in, on or secreted from non-adherent CD133⁺ EPCs at a level at least 2 fold greater than in, on or secreted from HUVECs and the nucleic acid comprises a sequence set forth in any one of SEQ ID NOs: 15, 1, 17, 9, 13, 3, 5, 7, 11, 19, 21, 23, 27, 29, 31, 33, 37, 39, 43, 45, 47, 49, 51, 53, 55, 57, 59, 61, 63, 65, 67, 69, 71, 73, 75, 77, 79, 81, 83, 85, 87, 93, 95, 97, 99, 101, 103, 105, 111, 113, 115, 117, 119, 121, 123, 125, 131, 133, 135, 137, 139, 141, 143, 145, 155, 159, 161, 163 or 327 or a nucleic acid having at least about 70% identity thereto, or the protein comprises a sequence set forth in any one of SEQ ID NOs: 16, 2, 18, 10, 14, 4, 6, 8, 20, 22, 24, 28, 30, 32, 34, 38, 40, 46, 48, 50, 52, 56, 58, 60, 62, 64, 66, 68, 70, 72, 74, 76, 78, 80, 82, 100, 104, 112, 114, 120, 122, 124, 126, 132, 134, 136, 138, 140, 162, 164, 238, 306 or 328 or a protein having at least about 70% identity thereto.

[0164] For example, the nucleic acid or protein is expressed in, on or secreted from EPCs at a level at least 3 fold greater than in, on or secreted by HUVECs and the nucleic acid comprises a sequence set forth in any one of SEQ ID NOs: 15, 1, 17, 9, 13, 3, 5, 7, 19, 21, 23, 27, 29, 31, 33, 37, 39, 43, 45, 47, 49, 51, 53, 55, 57, 59, 61, 63, 65, 67, 69, 71, 73, 75, 77, 79, 81, 83, 85, 87, 93, 95, 97, 99, 101, 103, 105, 111, 113, 115, 117, 119, 121, 123, 125, 131, 133, 135, 137, 139, 141, 143, 145, 155, 159, 161, 163 or 327 or a nucleic acid having at least about 70% identity thereto, or the protein comprises a sequence set forth in any one of SEQ ID NOs: 16, 2, 18, 10, 14, 4, 6, 8, 20, 22, 24, 28, 30, 32, 34, 38, 40, 44, 46, 48, 50, 52, 54, 56, 58, 60, 62, 64, 66, 68, 70, 72, 74, 76, 78, 80, 82, 84, 86, 88, 94, 96, 98, 100, 102, 104, 106, 112, 114, 116, 118, 120, 122, 124, 126, 132, 134, 136, 138, 140, 142, 144, 146, 156, 160, 162, 164 or 328 or a protein having at least about 70% identity thereto.

[0165] For example, the nucleic acid or protein is expressed in, on or secreted from non-adherent CD133⁺ EPCs at a level at least 3 fold greater than in, on or secreted from HUVECs and the nucleic acid comprises a sequence set forth in any one of SEQ ID NOs: 15, 1, 17, 9, 13, 3, 7, 19, 21, 23, 27, 29, 31, 33, 37, 39, 45, 47, 49, 51, 55, 57, 59, 61, 63, 65, 67, 69, 71, 73, 75, 77, 79, 81, 99, 103, 111, 113, 119, 121, 123, 125, 131, 133, 135, 137, 139, 161, 163, 237, 305 or 327 or a nucleic acid having at least about 70% identity thereto, or the protein comprises a sequence set forth in any one of SEQ ID NOs: 16, 2, 18, 10, 14, 4, 8, 18, 20, 22, 24, 28, 30, 32, 34, 38, 40, 46, 48, 50, 52, 56, 58, 60, 62, 64, 66, 68, 70, 72, 74, 76, 78, 80, 82, 100, 104, 112, 114, 120, 122, 124, 126, 132, 134, 136, 138, 140, 162, 164, 238, 306 or 328 or a protein having at least about 70% identity thereto.

[0166] For example, the nucleic acid or protein is expressed in, on or secreted from non-adherent CD133⁺ EPCs at a level at least 4 fold greater than in, on or secreted from HUVECs and the nucleic acid comprises a sequence set forth in any one of SEQ ID NOs: 15, 1, 17, 13, 7, 19, 21, 27, 29, 37, 39, 45, 47, 55, 57, 59, 61, 63, 65, 67, 69, 71, 73, 75, 77, 79, 99, 103, 111, 121, 123, 125, 131, 133, 135, 161, 163 or 327 or a nucleic acid having at least about 70% identity thereto, or the protein comprises a sequence set forth in any one of SEQ ID NOs: 16, 2, 18, 14, 8, 20, 22, 28, 30, 40, 46, 48, 56, 58, 60, 62, 64, 66, 68, 104, 122, 124, 126, 132, 134, 162, 164 or 328 or a protein having at least about 70% identity thereto.

[0167] For example, the nucleic acid or protein is expressed in, on or secreted from non-adherent CD133⁺ EPCs at a level at least 5 fold greater than in, on or secreted from HUVECs and the nucleic acid comprises a sequence set forth in any one of SEQ ID NOs: 15, 1, 7, 19, 27, 29, 39, 45, 47, 55, 57, 59, 61, 63, 65, 67, 103, 121, 123, 125, 131, 133, 161, 163 or 327 or a nucleic acid having at least about 70% identity thereto, or the protein comprises a sequence set forth in any one of SEQ ID NOs: 16, 2, 8, 28, 32, 36, 38, 46, 48, 50, 52, 54, 56, 58, 102, 104, 122, 124, 126, 132, 134, 162, 164 or 328 or a protein having at least about 70% identity thereto.

[0168] For example, the nucleic acid or protein is expressed in, on or secreted from non-adherent CD133⁺ EPCs at a level at least 6 fold greater than in, on or secreted from HUVECs and the nucleic acid comprises a sequence set forth in any one of SEQ ID NOs: 15, 1, 7, 19, 39, 45, 47, 55, 57, 59, 61, 63, 121, 123, 125, 133, 161, 163 or 327 or a nucleic acid having at least about 70% identity thereto, or the protein comprises a sequence set forth in any one of SEQ ID NOs: 16, 2, 8, 20, 40, 46, 48, 56, 58, 60, 62, 64, 122, 124, 126, 134, 162, 164 or 328 or a protein having at least about 70% identity thereto.

[0169] In one example, the level of expression is determined using a microarray.

[0170] In one example, a protein or nucleic acid has one or more (e.g., has all) of the following characteristics:
[0171] Is expressed on EPCs and has low, or undetectable expression on endothelial cells;
[0172] A protein is expressed on the cell surface; and
[0173] A protein contains a transmembrane domain.

[0174] In one example, the protein is selected from the group consisting of DSG2, EMB, EMR2, NKG7, ADCY7, SLC39A8, TM7SF3, NCSTN, SIRPB1, INSRR, PKD2L1, DPP6, LRRC33 or SLC1A5 or the nucleic acid encodes one of the foregoing proteins.

[0175] In one example, the nucleic acid comprises the sequence of SEQ ID NO: 15, 1, 17, 337, 9, 13, 3, 5, 177, 331, 233, 227, 193, 339 or 225 or a sequence having at least about 70% identity thereto, or the protein comprises the sequence of SEQ ID NO: 16, 2, 18, 338, 10, 14, 4, 6, 178, 332, 234, 228, 194, 340 or 226 or a sequence having at least about 70% identity thereto.

[0176] In one example, the nucleic acid comprises the sequence of SEQ ID NO: 15 or a sequence having at least about 70% identity thereto, or the protein comprises the sequence of SEQ ID NO: 16 or a sequence having at least about 70% identity thereto.

[0177] In one example, the nucleic acid comprises the sequence of SEQ ID NO: 17 or a sequence having at least about 70% identity thereto, or the protein comprises the sequence of SEQ ID NO: 18 or a sequence having at least about 70% identity thereto.

[0178] In one example, the nucleic acid comprises the sequence of SEQ ID NO: 1 or a sequence having at least about 70% identity thereto, or the protein comprises the sequence of SEQ ID NO: 2 or a sequence having at least about 70% identity thereto.

[0179] In one example of a diagnostic or prognostic method described herein, the protein comprises the sequence of SEQ ID NO: 2, 4, 6, 8, 10, 12, 14, 16 or 18 or a protein having at least about 70% identity thereto or the nucleic acid comprises the sequence of SEQ ID NO: 1, 3, 5, 7, 9, 11, 13, 15 or 17 or a nucleic acid having at least about 70% identity thereto.

[0180] In another example of a diagnostic or prognostic method described herein, the protein is selected from the group consisting of a protein that is a cell adhesion protein as set forth in Table 2, a transporter protein as set forth in Table 3, a growth factor as set forth in Table 4, a receptor as set forth in Table 5 and an enzyme as set forth in Table 6 or wherein the nucleic acid encodes any of the foregoing proteins.

[0181] In a further example of a diagnostic or prognostic method described herein, the protein is an immunoglobulin, cell adhesion protein comprising the sequence of SEQ ID NO: 2, 24 or 26 or a protein having at least about 70% identity thereto, or the nucleic acid encodes the immunoglobulin, cell adhesion protein and comprises the sequence of SEQ ID NO: 1, 23 or 25 or a nucleic acid having at least about 70% identity thereto.

[0182] The identification of cell surface markers of EPCs also provides the basis for in vivo methods for detecting EPCs or diagnosing/prognosing conditions (e.g., imaging methods). Accordingly, the disclosure also provides a method for localising and/or detecting and/or diagnosing and/or prognosing an EPC-associated condition in a subject, the method comprising:
[0183] (i) administering to a subject a compound that binds specifically to a compound that binds to a protein set forth in Table 1 such that the compound binds to the protein, if present; and
[0184] (ii) detecting the compound bound to the protein in vivo, wherein detection of the bound compound localises and/or detects and/or diagnoses and/or prognoses the EPC-associated condition.

[0185] In one example, the compound is conjugated to a detectable label and the method comprises detecting the label to detect the compound bound to the protein.

[0186] For example, the protein is expressed in, on or secreted from EPCs at a level at least 1.5 fold greater than in, on or secreted by human umbilical cord vascular endothelial cells (HUVECs), for example, at a level at least 2 fold greater than in, on or secreted by HUVECs, such as at a level at least 3 or 4 or 5 fold greater than in, on or secreted by HUVECs.

[0187] For example, the protein is expressed in, on or secreted by non-adherent CD133⁺ EPCs at a level at least 1.5 fold greater than in, on or secreted by HUVECs, for example, at a level at least 2 fold greater than in, on or secreted by HUVECs, more such as at a level at least 3 or 4 or 5 fold greater than in, on or secreted by HUVECs.

[0188] For example, the protein is expressed in, on or secreted from EPCs at a level at least 1.5 fold greater than in, on or secreted by HUVECs and the protein comprises a sequence set forth in any one of SEQ ID NOs: 16, 2, 18, 10, 14, 4, 6, 8, 12, 20, 22, 24, 26, 28, 30, 32, 34, 36, 38, 40, 42, 44, 46, 48, 50, 52, 54, 56, 58, 60, 62, 64, 66, 68, 70, 72, 74, 76, 78, 80, 82, 84, 86, 88, 90, 92, 94, 96, 98, 100, 102, 104, 106, 108, 110, 112, 114, 116, 118, 120, 122, 124, 126, 128, 130, 132, 134, 136, 138, 140, 142, 144, 146, 148, 150, 152, 154, 156, 158, 160, 162, 164, 238, 240, 242, 244, 246, 248, 250, 252, 254, 256, 258, 260, 266, 268, 270, 272, 274, 276, 278, 280, 282, 306, 308, 310, 312, 314, 316, 318, 320, 322, 324, 326 or 328 or a protein having at least about 70% identity thereto.

[0189] For example, the protein is expressed in, on or secreted by non-adherent CD133⁺ EPCs at a level at least 1.5 fold greater than in, on or secreted by HUVECs and the protein comprises a sequence set forth in any one of SEQ ID NOs: 16, 2, 18, 10, 14, 4, 6, 8, 12, 20, 22, 24, 26, 28, 30, 32, 34, 36, 38, 40, 42, 44, 46, 48, 50, 52, 54, 56, 58, 60, 62, 64, 66, 68, 70, 72, 74, 76, 78, 80, 82, 84, 86, 88, 90, 92, 94, 96, 98, 100, 102, 104, 106, 108, 110, 112, 114, 116, 118, 120, 122, 124, 126, 128, 130, 132, 134, 136, 138, 140, 142, 144, 146, 148, 150, 152, 154, 156, 158, 160, 162, 164 or 328 or a protein having at least about 70% identity thereto.

[0190] For example, the protein is expressed in, on or secreted from EPCs at a level at least 2 fold greater than in, on or secreted by HUVECs and the protein comprises a sequence set forth in any one of SEQ ID NOs: 16, 2, 18, 10, 14, 4, 6, 8, 20, 22, 24, 28, 30, 32, 34, 38, 40, 44, 46, 48, 50, 52, 54, 56, 58, 60, 62, 64, 66, 68, 70, 72, 74, 76, 78, 80, 82, 84, 86, 88, 94, 96, 98, 100, 102, 104, 106, 112, 114, 116, 118, 120, 122, 124, 126, 132, 134, 136, 138, 140, 142, 144, 146, 156, 160, 162, 164, 238, 240, 242, 244, 246, 248, 250, 252, 266, 306, 308, 310, 312 or 328 or a protein having at least about 70% identity thereto.

[0191] For example, the protein is expressed in, on or secreted from non-adherent CD133⁺ EPCs at a level at least 2 fold greater than in, on or secreted from HUVECs and the protein comprises a sequence set forth in any one of SEQ ID NOs: 16, 2, 18, 10, 14, 4, 6, 8, 20, 22, 24, 28, 30, 32, 34, 38, 40, 46, 48, 50, 52, 56, 58, 60, 62, 64, 66, 68, 70, 72, 74, 76, 78, 80, 82, 100, 104, 112, 114, 120, 122, 124, 126, 132, 134, 136, 138, 140, 162, 164, 238, 306 or 328 or a protein having at least about 70% identity thereto.

[0192] For example, the protein is expressed in, on or secreted from EPCs at a level at least 3 fold greater than in, on or secreted by HUVECs and the protein comprises a sequence set forth in any one of SEQ ID NOs: 16, 2, 18, 10, 14, 4, 6, 8, 20, 22, 24, 28, 30, 32, 34, 38, 40, 44, 46, 48, 50, 52, 54, 56, 58, 60, 62, 64, 66, 68, 70, 72, 74, 76, 78, 80, 82, 84, 86, 88, 94, 96, 98, 100, 102, 104, 106, 112, 114, 116, 118, 120, 122, 124, 126, 132, 134, 136, 138, 140, 142, 144, 146, 156, 160, 162, 164 or 328 or a protein having at least about 70% identity thereto.

[0193] For example, the protein is expressed in, on or secreted from non-adherent CD133⁺ EPCs at a level at least 3 fold greater than in, on or secreted from HUVECs and the protein comprises a sequence set forth in any one of SEQ ID NOs: 16, 2, 18, 10, 14, 4, 8, 18, 20, 22, 24, 28, 30, 32, 34, 38, 40, 46, 48, 50, 52, 56, 58, 60, 62, 64, 66, 68, 70, 72, 74, 76, 78, 80, 82, 100, 104, 112, 114, 120, 122, 124, 126, 132, 134, 136, 138, 140, 162, 164, 238, 306 or 328 or a protein having at least about 70% identity thereto.

[0194] For example, the protein is expressed in, on or secreted from non-adherent CD133⁺ EPCs at a level at least 4 fold greater than in, on or secreted from HUVECs and the protein comprises a sequence set forth in any one of SEQ ID NOs: 16, 2, 18, 14, 8, 20, 22, 28, 30, 40, 46, 48, 56, 58, 60, 62, 64, 66, 68, 104, 122, 124, 126, 132, 134, 162, 164 or 328 or a protein having at least about 70% identity thereto.

[0195] For example, the protein is expressed in, on or secreted from non-adherent CD133⁺ EPCs at a level at least 5 fold greater than in, on or secreted from HUVECs and the protein comprises a sequence set forth in any one of SEQ ID NOs: 16, 2, 8, 28, 32, 36, 38, 46, 48, 50, 52, 54, 56, 58, 102, 104, 122, 124, 126, 132, 134, 162, 164 or 328 or a protein having at least about 70% identity thereto.

[0196] For example, the protein is expressed in, on or secreted from non-adherent CD133⁺ EPCs at a level at least 6 fold greater than in, on or secreted from HUVECs and the protein comprises a sequence set forth in any one of SEQ ID NOs: 16, 2, 8, 20, 40, 46, 48, 56, 58, 60, 62, 64, 122, 124, 126, 134, 162, 164 or 328 or a protein having at least about 70% identity thereto.

[0197] In one example, the level of expression is determined using a microarray.

[0198] In one example, a protein or nucleic acid has one or more (e.g., has all) of the following characteristics:
[0199] Is expressed on EPCs and has low, or undetectable expression on endothelial cells;
[0200] A protein is expressed on the cell surface; and
[0201] A protein contains a transmembrane domain.

[0202] In one example, the protein is selected from the group consisting of DSG2, EMB, EMR2, NKG7, ADCY7, SLC39A8, TM7SF3, NCSTN, SIRPB1, INSRR, PKD2L1, DPP6, LRRC33 or SLC1A5.

[0203] In one example, the nucleic acid comprises the sequence of SEQ ID NO: 15, 1, 17, 337, 9, 13, 3, 5, 177, 331, 233, 227, 193, 339 or 225 or a sequence having at least about 70% identity thereto, or the protein comprises the sequence of SEQ ID NO: 16, 2, 18, 338, 10, 14, 4, 6, 178, 332, 234, 228, 194, 340 or 226 or a sequence having at least about 70% identity thereto.

[0204] In one example, the nucleic acid comprises the sequence of SEQ ID NO: 15 or a sequence having at least about 70% identity thereto, or the protein comprises the sequence of SEQ ID NO: 16 or a sequence having at least about 70% identity thereto.

[0205] In one example, the nucleic acid comprises the sequence of SEQ ID NO: 17 or a sequence having at least about 70% identity thereto, or the protein comprises the sequence of SEQ ID NO: 18 or a sequence having at least about 70% identity thereto.

[0206] In one example, the nucleic acid comprises the sequence of SEQ ID NO: 1 or a sequence having at least about 70% identity thereto, or the protein comprises the sequence of SEQ ID NO: 2 or a sequence having at least about 70% identity thereto.

[0207] In one example, the protein comprises the sequence of SEQ ID NO: 2, 4, 6, 8, 10, 12, 14, 16 or 18 or a protein having at least about 70% identity thereto.

[0208] In another example, the protein is selected from the group consisting of a protein that is a cell adhesion protein as set forth in Table 2, a transporter protein as set forth in Table 3, a growth factor as set forth in Table 4, a receptor as set forth in Table 5 and an enzyme as set forth in Table 6.

[0209] In a further example, the protein is an immunoglobulin, cell adhesion protein comprising the sequence of SEQ ID NO: 2, 24 or 26 or a protein having at least about 70% identity thereto.

[0210] Exemplary compounds include antibodies or proteins comprising an antigen binding domain of an antibody.

[0211] In one example, the EPC-associated condition is a cardiovascular disease and/or cancer and/or preeclampsia and/or hepatitis and/or sepsis and/or an autoimmune disease and/or an inflammatory disease and/or ischemia and/or a condition caused by or associated with excessive neovascularization. Exemplary conditions associated with excessive neovascularization include psoriasis, nephropathy, cancer neovascularization or retinopathy

[0212] Exemplary EPC-associated conditions for diagnosis/prognosis using a method as described herein according to any example of the disclosure include the following:
[0213] A cardiovascular disease (including coronary artery disease or dysfunctional bicuspid aortic valve) or cerebrovascular disease which is diagnosed/prognosed by detecting reduced levels of EPCs or a reduced level of a nucleic acid or protein set forth in Table 1 in a sample from a subject;
[0214] An autoimmune disease, e.g., rheumatoid arthritis, SLE, diabetes (e.g., type 1 diabetes) or systemic sclerosis, e.g., more than five years after onset which is/are diagnosed/prognosed by detecting reduced levels of EPCs or a reduced level of a nucleic acid or protein set forth in Table 1 in a sample from a subject;
[0215] Ischemia, e.g., stroke, which is diagnosed/prognosed by detecting reduced levels of EPCs or an increased level of a nucleic acid or protein set forth in Table 1 in a sample from a subject.
[0216] Sepsis, which is diagnosed by detecting reduced levels of EPCs or a reduced level of a protein set forth in Table 1 in a sample from a subject.
[0217] A condition associated with excessive neovascularization, e.g., psoriasis, nephropathy, cancer neovascularization, cancer or retinopathy, which is/are diagnosed/prognosed by detecting increased levels of EPCs or an increased level of a nucleic acid or protein set forth in Table 1 in a sample from a subject.

[0218] In one example, a diagnostic method described herein predicts likelihood that a subject will suffer from a condition. For example, a reduced number of EPCs (e.g., detected by performing a method as described herein according to any example) is indicative of a subject likely to suffer from a cardiovascular disease (including coronary artery disease or dysfunctional bicuspid aortic valve) or cerebrovascular disease or an autoimmune disease, e.g., rheumatoid arthritis, SLE or systemic sclerosis or ischemia, e.g., a stroke, or sepsis. In another example, an increased number of EPCs indicates a risk of cancer.

[0219] The skilled artisan will appreciate that methods described herein for isolating an EPC also provide the basis for increasing EPC numbers in a subject, e.g., by adoptive transfer or cell therapy. Increasing EPCs numbers is useful for, for example, treating or preventing a condition associated with reduced EPC numbers and/or inducing neovascularization, e.g., to improve grafting or wound healing or reduce the effects of ischemia and/or to reduce hypertension and/or to improve healing of bone defects. Accordingly, another example of the present disclosure provides a method of treating or preventing a condition associated with reduced EPCs or activity, treating or preventing a condition associated with insufficient neovascularization and/or improving grafting and/or improving wound healing in a subject, said method comprising:
[0220] (i) isolating a population enriched for EPCs by performing a method of the disclosure; and
[0221] (ii) administering the cells at (i) to the subject.

[0222] In another example, the disclosure provides a method of treating or preventing a condition associated with reduced EPC numbers or activity, treating or preventing a condition associated with insufficient neovascularization and/or improving grafting and/or improving wound healing in a subject, the method comprising administering a composition comprising a population of cells enriched for EPCs of the disclosure.

[0223] In the situation of a graft, e.g., a blood vessel graft, the cells can be administered immobilized on a solid support or semi-solid support, e.g., in the form of a vascular graft.

[0224] In one example, the subject suffers from or is at risk of developing a condition associated with reduced EPC numbers and/or activity and/or a condition associated with insufficient neovascularization and/or requires a graft or has undergone grafting and/or requires improved wound healing.

[0225] Exemplary conditions to be treated by administering populations of cells enriched for EPCs include cardiovascular disease, cerebrovascular disease, hypertension, chronic kidney disease, vessel occlusion, ischemia (including stroke), an autoimmune disease, or sepsis.

[0226] In one example, the condition is coronary artery disease or dysfunctional bicuspid aortic valve.

[0227] In one example, the condition is stroke.

[0228] In one example, a method for treating or preventing a condition comprises additionally administering another cell or another therapeutic compound to a subject. For example, to treat a subject suffering from diabetes (e.g., type 1 diabetes) a population enriched for EPCs according to the present disclosure are administered to a subject, e.g., in combination with pancreatic islet cells.

[0229] For example, the cells are from the subject to be treated, i.e., an autologous transplant, or from a related subject of the same or unrelated species (e.g., a HLA matched subject or xenograft), i.e., an allogeneic or xenogeneic transplant.

[0230] For example, an effective amount, e.g., a therapeutically or prophylactically effective amount of cells is administered to the subject.

[0231] The present disclosure also provides a method of treating or preventing a condition associated with reduced EPC numbers or activity and/or treating or preventing a condition associated with insufficient neovascularization and/or improving grafting and/or improving wound healing in a subject, said method comprising administering to a subject in need thereof a solid support or a semi-solid support having immobilized thereon a compound that binds to a protein set forth in Table 1 for a time and under conditions for the compound to bind to EPCs from the subject, and for example, induces vascularization.

[0232] In one example, the condition associated with reduced EPC numbers or activity is a cardiovascular disease and/or an autoimmune disease and/or an inflammatory disease.

[0233] For example, the protein is expressed in, on or secreted from EPCs at a level at least 1.5 fold greater than in, on or secreted by human umbilical cord vascular endothelial cells (HUVECs), for example, at a level at least 2 fold greater than in, on or secreted by HUVECs, such as at a level at least 3 or 4 or 5 fold greater than in, on or secreted by HUVECs.

[0234] For example, the protein is expressed in, on or secreted by non-adherent CD133⁺ EPCs at a level at least 1.5 fold greater than in, on or secreted by HUVECs, for example at a level at least 2 fold greater than in, on or secreted by HUVECs, such as at a level at least 3 or 4 or 5 fold greater than in, on or secreted by HUVECs.

[0235] For example, the protein is expressed in, on or secreted from EPCs at a level at least 1.5 fold greater than in, on or secreted by HUVECs and the protein comprises a sequence set forth in any one of SEQ ID NOs: 16, 2, 18, 10, 14, 4, 6, 8, 12, 20, 22, 24, 26, 28, 30, 32, 34, 36, 38, 40, 42, 44, 46, 48, 50, 52, 54, 56, 58, 60, 62, 64, 66, 68, 70, 72, 74, 76, 78, 80, 82, 84, 86, 88, 90, 92, 94, 96, 98, 100, 102, 104, 106, 108, 110, 112, 114, 116, 118, 120, 122, 124, 126, 128, 130, 132, 134, 136, 138, 140, 142, 144, 146, 148, 150, 152, 154, 156, 158, 160, 162, 164, 238, 240, 242, 244, 246, 248, 250, 252, 254, 256, 258, 260, 266, 268, 270, 272, 274, 276, 278, 280, 282, 306, 308, 310, 312, 314, 316, 318, 320, 322, 324, 326 or 328 or a protein having at least about 70% identity thereto.

[0236] For example, the protein is expressed in, on or secreted by non-adherent CD133⁺ EPCs at a level at least 1.5 fold greater than in, on or secreted by HUVECs and the protein comprises a sequence set forth in any one of SEQ ID NOs: 16, 2, 18, 10, 14, 4, 6, 8, 12, 20, 22, 24, 26, 28, 30, 32, 34, 36, 38, 40, 42, 44, 46, 48, 50, 52, 54, 56, 58, 60, 62, 64, 66, 68, 70, 72, 74, 76, 78, 80, 82, 84, 86, 88, 90, 92, 94, 96, 98, 100, 102, 104, 106, 108, 110, 112, 114, 116, 118, 120, 122, 124, 126, 128, 130, 132, 134, 136, 138, 140, 142, 144, 146, 148, 150, 152, 154, 156, 158, 160, 162, 164 or 328 or a protein having at least about 70% identity thereto.

[0237] For example, the protein is expressed in, on or secreted from EPCs at a level at least 2 fold greater than in, on or secreted by HUVECs and the protein comprises a sequence set forth in any one of SEQ ID NOs: 16, 2, 18, 10, 14, 4, 6, 8, 20, 22, 24, 28, 30, 32, 34, 38, 40, 44, 46, 48, 50, 52, 54, 56, 58, 60, 62, 64, 66, 68, 70, 72, 74, 76, 78, 80, 82, 84, 86, 88, 94, 96, 98, 100, 102, 104, 106, 112, 114, 116, 118, 120, 122, 124, 126, 132, 134, 136, 138, 140, 142, 144, 146, 156, 160, 162, 164, 238, 240, 242, 244, 246, 248, 250, 252, 266, 306, 308, 310, 312 or 328 or a protein having at least about 70% identity thereto.

[0238] For example, the protein is expressed in, on or secreted from non-adherent CD133⁺ EPCs at a level at least 2 fold greater than in, on or secreted from HUVECs and the protein comprises a sequence set forth in any one of SEQ ID NOs: 16, 2, 18, 10, 14, 4, 6, 8, 20, 22, 24, 28, 30, 32, 34, 38, 40, 46, 48, 50, 52, 56, 58, 60, 62, 64, 66, 68, 70, 72, 74, 76, 78, 80, 82, 100, 104, 112, 114, 120, 122, 124, 126, 132, 134, 136, 138, 140, 162, 164, 238, 306 or 328 or a protein having at least about 70% identity thereto.

[0239] For example, the protein is expressed in, on or secreted from EPCs at a level at least 3 fold greater than in, on or secreted by HUVECs and the protein comprises a sequence set forth in any one of SEQ ID NOs: 16, 2, 18, 10, 14, 4, 6, 8, 20, 22, 24, 28, 30, 32, 34, 38, 40, 44, 46, 48, 50, 52, 54, 56, 58, 60, 62, 64, 66, 68, 70, 72, 74, 76, 78, 80, 82, 84, 86, 88, 94, 96, 98, 100, 102, 104, 106, 112, 114, 116, 118, 120, 122, 124, 126, 132, 134, 136, 138, 140, 142, 144, 146, 156, 160, 162, 164 or 328 or a protein having at least about 70% identity thereto.

[0240] For example, the protein is expressed in, on or secreted from non-adherent CD133⁺ EPCs at a level at least 3 fold greater than in, on or secreted from HUVECs and the protein comprises a sequence set forth in any one of SEQ ID NOs: 16, 2, 18, 10, 14, 4, 8, 18, 20, 22, 24, 28, 30, 32, 34, 38, 40, 46, 48, 50, 52, 56, 58, 60, 62, 64, 66, 68, 70, 72, 74, 76, 78, 80, 82, 100, 104, 112, 114, 120, 122, 124, 126, 132, 134, 136, 138, 140, 162, 164, 238, 306 or 328 or a protein having at least about 70% identity thereto.

[0241] For example, the protein is expressed in, on or secreted from non-adherent CD133⁺ EPCs at a level at least 4 fold greater than in, on or secreted from HUVECs and the protein comprises a sequence set forth in any one of SEQ ID NOs: 16, 2, 18, 14, 8, 20, 22, 28, 30, 40, 46, 48, 56, 58, 60, 62, 64, 66, 68, 104, 122, 124, 126, 132, 134, 162, 164 or 328 or a protein having at least about 70% identity thereto.

[0242] For example, the protein is expressed in, on or secreted from non-adherent CD133⁺ EPCs at a level at least 5 fold greater than in, on or secreted from HUVECs and the protein comprises a sequence set forth in any one of SEQ ID NOs: 16, 2, 8, 28, 32, 36, 38, 46, 48, 50, 52, 54, 56, 58, 102, 104, 122, 124, 126, 132, 134, 162, 164 or 328 or a protein having at least about 70% identity thereto.

[0243] For example, the protein is expressed in, on or secreted from non-adherent CD133⁺ EPCs at a level at least 6 fold greater than in, on or secreted from HUVECs and the protein comprises a sequence set forth in any one of SEQ ID NOs: 16, 2, 8, 20, 40, 46, 48, 56, 58, 60, 62, 64, 122, 124, 126, 134, 162, 164 or 328 or a protein having at least about 70% identity thereto.

[0244] In one example, a protein has one or more (e.g., has all) of the following characteristics:
[0245] Is expressed on EPCs and has low, or undetectable expression on endothelial cells;
[0246] A protein is expressed on the cell surface; and
[0247] A protein contains a transmembrane domain.

[0248] In one example, the protein is selected from the group consisting of DSG2, EMB, EMR2, NKG7, ADCY7, SLC39A8, TM7SF3, NCSTN, SIRPB1, INSRR, PKD2L1, DPP6, LRRC33 or SLC1A5.

[0249] In one example, the population of cells is enriched for EPCs expressing a protein comprising the sequence of SEQ ID NO: 16, 2, 18, 338, 10, 14, 4, 6, 178, 332, 234, 228, 194, 340 or 226 or a sequence having at least about 70% identity thereto.

[0250] In one example, the population of cells is enriched for EPCs expressing a protein comprising the sequence of SEQ ID NO: 16 or a sequence having at least about 70% identity thereto.

[0251] In one example, the population of cells is enriched for EPCs expressing a protein comprising the sequence of SEQ ID NO: 18 or a sequence having at least about 70% identity thereto.

[0252] In one example, the population of cells is enriched for EPCs expressing a protein comprising the sequence of SEQ ID NO: 2 or a sequence having at least about 70% identity thereto.

[0253] In one example, the population of cells administered to the subject are enriched for EPCs expressing a protein comprising the sequence of SEQ ID NO: 2, 4, 6, 8, 10, 12, 14, 16 or 18 or a protein having at least about 70% identity thereto or a nucleic acid comprising the sequence of SEQ ID NO: 1, 3, 5, 7, 9, 11, 13, 15 or 17 or a nucleic acid having at least about 70% identity thereto.

[0254] In one example, the population of cells administered to the subject are enriched for EPCs expressing a protein selected from the group consisting of a protein that is a cell adhesion protein as set forth in Table 2, a transporter protein as set forth in Table 3, a growth factor as set forth in Table 4, a receptor as set forth in Table 5 and an enzyme as set forth in Table 6 or expressing a nucleic acid encodes any of the foregoing proteins.

[0255] In one example, the population of cells administered to the subject are enriched for EPCs expressing an immunoglobulin, cell adhesion protein comprising the sequence of SEQ ID NO: 2, 24 or 26 or a protein having at least about 70% identity thereto, or a nucleic acid encoding the immunoglobulin, cell adhesion protein and comprises the sequence of SEQ ID NO: 1, 23 or 25 or a nucleic acid having at least about 70% identity thereto.

[0256] The identification of cell surface proteins preferentially expressed by EPCs also provides the means for modulating the number of those cells in a subject, e.g., to reduce or prevent neovascularization or to induce or enhance neovascularisation. Accordingly, another example of the present disclosure provides a method of modulating neovascularization and/or EPC numbers or activity in a subject, the method comprising administering to a subject in need thereof a compound that modulates expression and/or activity of a protein or nucleic acid set forth in Table 1, and/or administering a compound that binds to a protein set forth in Table 1 and modulates EPC activity and/or induces EPC death and/or EPC proliferation.

[0257] A further example of the disclosure provides a method for modulating neovascularization, the method comprising administering to a subject in need thereof a compound that modulates expression and/or activity of a protein or nucleic acid set forth in Table 1, and/or administering a compound that binds to a protein set forth in Table 1 and modulates EPC activity and/or induces EPC death and/or EPC proliferation.

[0258] Another example of the present disclosure provides a method of treating or preventing a condition associated with excessive neovascularization and/or excessive EPC numbers or activity in a subject, the method comprising administering to a subject in need thereof a compound that reduces expression and/or activity of a protein or nucleic acid set forth in Table 1, and/or administering a compound that binds to a protein set forth in Table 1 and reduces EPC activity and/or induces EPC death and/or suppresses EPC proliferation.

[0259] A further example of the disclosure provides a method for reducing or preventing neovascularization, the method comprising administering to a subject in need thereof a compound that reduces expression and/or activity of a protein or nucleic acid set forth in Table 1, and/or administering a compound that binds to a protein set forth in Table 1 and reduces EPC activity and/or induces EPC death and/or suppresses EPC proliferation.

[0260] A further example of the present disclosure provides a method of treating or preventing a condition associated with insufficient neovascularization and/or insufficient EPC numbers or activity in a subject, the method comprising administering to a subject in need thereof a compound that reduces expression and/or activity of a protein or nucleic acid set forth in Table 1, and/or administering a compound that binds to a protein set forth in Table 1 and induces or enhances EPC activity and/or suppresses EPC death and/or induces or enhances EPC proliferation.

[0261] A further example of the disclosure provides a method for inducing or enhancing neovascularization, the method comprising administering to a subject in need thereof a compound that reduces expression and/or activity of a protein or nucleic acid set forth in Table 1, and/or administering a compound that binds to a protein set forth in Table 1 and induces or enhances EPC activity and/or suppresses EPC death and/or induces or enhances EPC proliferation.

[0262] Another example of the present disclosure provides a method of treating or preventing a condition associated with excessive neovascularization and/or excessive EPC numbers or activity in a subject, the method comprising administering to a subject in need thereof a compound that induces or enhances expression and/or activity of a protein or nucleic acid set forth in Table 1, and/or administering a compound that binds to a protein set forth in Table 1 and reduces EPC activity and/or induces EPC death and/or suppresses EPC proliferation.

[0263] A further example of the disclosure provides a method for reducing or preventing neovascularization, the method comprising administering to a subject in need thereof a compound that induces or enhances expression and/or activity of a protein or nucleic acid set forth in Table 1, and/or administering a compound that binds to a protein set forth in Table 1 and reduces EPC activity and/or induces EPC death and/or suppresses EPC proliferation.

[0264] A further example of the present disclosure provides a method of treating or preventing a condition associated with insufficient neovascularization and/or insufficient EPC numbers or activity in a subject, the method comprising administering to a subject in need thereof a compound that induces or enhances expression and/or activity of a protein or nucleic acid set forth in Table 1, and/or administering a compound that binds to a protein set forth in Table 1 and induces or enhances EPC activity and/or suppresses EPC death and/or induces or enhances EPC proliferation.

[0265] A further example of the disclosure provides a method for inducing or enhancing neovascularization, the method comprising administering to a subject in need thereof a compound that induces or enhances expression and/or activity of a protein or nucleic acid set forth in Table 1, and/or administering a compound that binds to a protein set forth in Table 1 and induces or enhances EPC activity and/or suppresses EPC death and/or induces or enhances EPC proliferation.

[0266] For example, the method comprises administering a compound that binds to a protein set forth in Table 1 and modulates EPC activity and/or modulates EPC death for a time and under conditions sufficient to modulate EPC numbers and/or activity and/or neovascularization in the subject or in a tissue or organ thereof. Exemplary compounds include antibodies and/or proteins comprising an antigen binding domain of an antibody, including, conjugates of said antibodies or proteins comprising a toxic compound to thereby kill an EPC.

[0267] In one example, the condition is an autoimmune condition and/or sepsis and/or nephropathy and/or cancer and/or cancer neovascularization and/or retinopathy.

[0268] In one example, the condition is cancer. For example, the cancer is melanoma. In this regard, the inventors have demonstrated that a marker of EPCs (e.g., DSG2) is also expressed by some melanoma cells, thus providing the basis for a dual mechanism therapeutic, e.g., directly targeting melanoma cells and by reducing or preventing neovascularisation.

[0269] In one example, the condition is cancer metastasis, i.e., the present disclosure provides a method for reducing or preventing cancer metastasis. Such a method can involve performing a method described herein according to any example to treat cancer and administering an additional anti-cancer agent or treating the subject with radiation therapy.

[0270] For example, the nucleic acid or protein is expressed in, on or secreted from EPCs at a level at least 1.5 fold greater than in, on or secreted by human umbilical cord vascular endothelial cells (HUVECs), for example, at a level at least 2 fold greater than in, on or secreted by HUVECs, such as at a level at least 3 or 4 or 5 fold greater than in, on or secreted by HUVECs.

[0271] For example, the nucleic acid or protein is expressed in, on or secreted by non-adherent CD133⁺ EPCs at a level at least 1.5 fold greater than in, on or secreted by HUVECs, for example, at a level at least 2 fold greater than in, on or secreted by HUVECs, such as at a level at least 3 or 4 or 5 fold greater than in, on or secreted by HUVECs.

[0272] For example, the nucleic acid or protein is expressed in, on or secreted from EPCs at a level at least 1.5 fold greater than in, on or secreted by HUVECs and the nucleic acid comprises a sequence set forth in any one of SEQ ID NOs: 15, 1, 17, 9, 13, 3, 5, 7, 11, 19, 21, 23, 25, 27, 29, 31, 33, 35, 37, 39, 41, 43, 45, 47, 49, 51, 53, 55, 57, 59, 61, 63, 65, 67, 69, 71, 73, 75, 77, 79, 81, 83, 85, 87, 89, 91, 93, 95, 97, 99, 101, 103, 105, 107, 109, 111, 113, 115, 117, 119, 121, 123, 125, 127, 129, 131, 133, 135, 137, 139, 141, 143, 145, 147, 149, 151, 153, 155, 157, 159, 161, 163, 237, 239, 241, 243, 245, 247, 249, 251, 253, 255, 257, 259, 265, 267, 269, 271, 273, 275, 277, 279, 281, 305, 307, 309, 311, 313, 315, 317, 319, 321, 323, 325 or 327 or a nucleic acid having at least about 70% identity thereto, or the protein comprises a sequence set forth in any one of SEQ ID NOs: 16, 2, 18, 10, 14, 4, 6, 8, 12, 20, 22, 24, 26, 28, 30, 32, 34, 36, 38, 40, 42, 44, 46, 48, 50, 52, 54, 56, 58, 60, 62, 64, 66, 68, 70, 72, 74, 76, 78, 80, 82, 84, 86, 88, 90, 92, 94, 96, 98, 100, 102, 104, 106, 108, 110, 112, 114, 116, 118, 120, 122, 124, 126, 128, 130, 132, 134, 136, 138, 140, 142, 144, 146, 148, 150, 152, 154, 156, 158, 160, 162, 164, 238, 240, 242, 244, 246, 248, 250, 252, 254, 256, 258, 260, 266, 268, 270, 272, 274, 276, 278, 280, 282, 306, 308, 310, 312, 314, 316, 318, 320, 322, 324, 326 or 328 or a protein having at least about 70% identity thereto.

[0273] For example, the nucleic acid or protein is expressed in, on or secreted by non-adherent CD133⁺ EPCs at a level at least 1.5 fold greater than in, on or secreted by HUVECs and the nucleic acid comprises a sequence set forth in any one of SEQ ID NOs: 15, 1, 17, 9, 13, 3, 5, 7, 11, 19, 21, 23, 25, 27, 29, 31, 33, 35, 37, 39, 41, 43, 45, 47, 49, 51, 53, 55, 57, 59, 61, 63, 65, 67, 69, 71, 73, 75, 77, 79, 81, 83, 85, 87, 89, 91, 93, 95, 97, 99, 101, 103, 105, 107, 109, 111, 113, 115, 117, 119, 121, 123, 125, 127, 129, 131, 133, 135, 137, 139, 141, 143, 145, 147, 149, 151, 153, 155, 157, 159, 161, 163 or 327 or a nucleic acid having at least about 70% identity thereto, or the protein comprises a sequence set forth in any one of SEQ ID NOs: 16, 2, 18, 10, 14, 4, 6, 8, 12, 20, 22, 24, 26, 28, 30, 32, 34, 36, 38, 40, 42, 44, 46, 48, 50, 52, 54, 56, 58, 60, 62, 64, 66, 68, 70, 72, 74, 76, 78, 80, 82, 84, 86, 88, 90, 92, 94, 96, 98, 100, 102, 104, 106, 108, 110, 112, 114, 116, 118, 120, 122, 124, 126, 128, 130, 132, 134, 136, 138, 140, 142, 144, 146, 148, 150, 152, 154, 156, 158, 160, 162, 164 or 328 or a protein having at least about 70% identity thereto.

[0274] For example, the nucleic acid or protein is expressed in, on or secreted from EPCs at a level at least 2 fold greater than in, on or secreted by HUVECs and the nucleic acid comprises a sequence set forth in any one of SEQ ID NOs: 15, 1, 17, 9, 13, 3, 5, 7, 19, 21, 23, 27, 29, 31, 33, 37, 39, 43, 45, 47, 49, 51, 53, 55, 57, 59, 61, 63, 65, 67, 69, 71, 73, 75, 77, 79, 81, 83, 85, 87, 93, 95, 97, 99, 101, 103, 105, 111, 113, 115, 117, 119, 121, 123, 125, 131, 133, 135, 137, 139, 141, 143, 145, 155, 159, 161, 163, 237, 239, 241, 243, 245, 247, 249, 251, 265, 305, 307, 309, 311 or 327 or a nucleic acid having at least about 70% identity thereto, or the protein comprises a sequence set forth in any one of SEQ ID NOs: 16, 2, 18, 10, 14, 4, 6, 8, 20, 22, 24, 28, 30, 32, 34, 38, 40, 44, 46, 48, 50, 52, 54, 56, 58, 60, 62, 64, 66, 68, 70, 72, 74, 76, 78, 80, 82, 84, 86, 88, 94, 96, 98, 100, 102, 104, 106, 112, 114, 116, 118, 120, 122, 124, 126, 132, 134, 136, 138, 140, 142, 144, 146, 156, 160, 162, 164, 238, 240, 242, 244, 246, 248, 250, 252, 266, 306, 308, 310, 312 or 328 or a protein having at least about 70% identity thereto.

[0275] For example, the nucleic acid or protein is expressed in, on or secreted from non-adherent CD133⁺ EPCs at a level at least 2 fold greater than in, on or secreted from HUVECs and the nucleic acid comprises a sequence set forth in any one of SEQ ID NOs: 15, 1, 17, 9, 13, 3, 5, 7, 11, 19, 21, 23, 27, 29, 31, 33, 37, 39, 43, 45, 47, 49, 51, 53, 55, 57, 59, 61, 63, 65, 67, 69, 71, 73, 75, 77, 79, 81, 83, 85, 87, 93, 95, 97, 99, 101, 103, 105, 111, 113, 115, 117, 119, 121, 123, 125, 131, 133, 135, 137, 139, 141, 143, 145, 155, 159, 161, 163 or 327 or a nucleic acid having at least about 70% identity thereto, or the protein comprises a sequence set forth in any one of SEQ ID NOs: 16, 2, 18, 10, 14, 4, 6, 8, 20, 22, 24, 28, 30, 32, 34, 38, 40, 46, 48, 50, 52, 56, 58, 60, 62, 64, 66, 68, 70, 72, 74, 76, 78, 80, 82, 100, 104, 112, 114, 120, 122, 124, 126, 132, 134, 136, 138, 140, 162, 164, 238, 306 or 328 or a protein having at least about 70% identity thereto.

[0276] For example, the nucleic acid or protein is expressed in, on or secreted from EPCs at a level at least 3 fold greater than in, on or secreted by HUVECs and the nucleic acid comprises a sequence set forth in any one of SEQ ID NOs: 15, 1, 17, 9, 13, 3, 5, 7, 19, 21, 23, 27, 29, 31, 33, 37, 39, 43, 45, 47, 49, 51, 53, 55, 57, 59, 61, 63, 65, 67, 69, 71, 73, 75, 77, 79, 81, 83, 85, 87, 93, 95, 97, 99, 101, 103, 105, 111, 113, 115, 117, 119, 121, 123, 125, 131, 133, 135, 137, 139, 141, 143, 145, 155, 159, 161, 163 or 327 or a nucleic acid having at least about 70% identity thereto, or the protein comprises a sequence set forth in any one of SEQ ID NOs: 16, 2, 18, 10, 14, 4, 6, 8, 20, 22, 24, 28, 30, 32, 34, 38, 40, 44, 46, 48, 50, 52, 54, 56, 58, 60, 62, 64, 66, 68, 70, 72, 74, 76, 78, 80, 82, 84, 86, 88, 94, 96, 98, 100, 102, 104, 106, 112, 114, 116, 118, 120, 122, 124, 126, 132, 134, 136, 138, 140, 142, 144, 146, 156, 160, 162, 164 or 328 or a protein having at least about 70% identity thereto.

[0277] For example, the nucleic acid or protein is expressed in, on or secreted from non-adherent CD133⁺ EPCs at a level at least 3 fold greater than in, on or secreted from HUVECs and the nucleic acid comprises a sequence set forth in any one of SEQ ID NOs: 15, 1, 17, 9, 13, 3, 7, 19, 21, 23, 27, 29, 31, 33, 37, 39, 45, 47, 49, 51, 55, 57, 59, 61, 63, 65, 67, 69, 71, 73, 75, 77, 79, 81, 99, 103, 111, 113, 119, 121, 123, 125, 131, 133, 135, 137, 139, 161, 163, 237, 305 or 327 or a nucleic acid having at least about 70% identity thereto, or the protein comprises a sequence set forth in any one of SEQ ID NOs: 16, 2, 18, 10, 14, 4, 8, 18, 20, 22, 24, 28, 30, 32, 34, 38, 40, 46, 48, 50, 52, 56, 58, 60, 62, 64, 66, 68, 70, 72, 74, 76, 78, 80, 82, 100, 104, 112, 114, 120, 122, 124, 126, 132, 134, 136, 138, 140, 162, 164, 238, 306 or 328 or a protein having at least about 70% identity thereto.

[0278] For example, the nucleic acid or protein is expressed in, on or secreted from non-adherent CD133⁺ EPCs at a level at least 4 fold greater than in, on or secreted from HUVECs and the nucleic acid comprises a sequence set forth in any one of SEQ ID NOs: 15, 1, 17, 13, 7, 19, 21, 27, 29, 37, 39, 45, 47, 55, 57, 59, 61, 63, 65, 67, 69, 71, 73, 75, 77, 79, 99, 103, 111, 121, 123, 125, 131, 133, 135, 161, 163 or 327 or a nucleic acid having at least about 70% identity thereto, or the protein comprises a sequence set forth in any one of SEQ ID NOs: 16, 2, 18, 14, 8, 20, 22, 28, 30, 40, 46, 48, 56, 58, 60, 62, 64, 66, 68, 104, 122, 124, 126, 132, 134, 162, 164 or 328 or a protein having at least about 70% identity thereto.

[0279] For example, the nucleic acid or protein is expressed in, on or secreted from non-adherent CD133⁺ EPCs at a level at least 5 fold greater than in, on or secreted from HUVECs and the nucleic acid comprises a sequence set forth in any one of SEQ ID NOs: 15, 1, 7, 19, 27, 29, 39, 45, 47, 55, 57, 59, 61, 63, 65, 67, 103, 121, 123, 125, 131, 133, 161, 163 or 327 or a nucleic acid having at least about 70% identity thereto, or the protein comprises a sequence set forth in any one of SEQ ID NOs: 16, 2, 8, 28, 32, 36, 38, 46, 48, 50, 52, 54, 56, 58, 102, 104, 122, 124, 126, 132, 134, 162, 164 or 328 or a protein having at least about 70% identity thereto.

[0280] For example, the nucleic acid or protein is expressed in, on or secreted from non-adherent CD133⁺ EPCs at a level at least 6 fold greater than in, on or secreted from HUVECs and the nucleic acid comprises a sequence set forth in any one of SEQ ID NOs: 15, 1, 7, 19, 39, 45, 47, 55, 57, 59, 61, 63, 121, 123, 125, 133, 161, 163 or 327 or a nucleic acid having at least about 70% identity thereto, or the protein comprises a sequence set forth in any one of SEQ ID NOs: 16, 2, 8, 20, 40, 46, 48, 56, 58, 60, 62, 64, 122, 124, 126, 134, 162, 164 or 328 or a protein having at least about 70% identity thereto.

[0281] In one example, the level of expression is determined using a microarray.

[0282] In one example, a protein or nucleic acid has one or more (e.g., has all) of the following characteristics:
[0283] Is expressed on EPCs and has low, or undetectable expression on endothelial cells;
[0284] A protein is expressed on the cell surface; and
[0285] A protein contains a transmembrane domain.

[0286] In one example, the protein is selected from the group consisting of DSG2, EMB, EMR2, NKG7, ADCY7, SLC39A8, TM7SF3, NCSTN, SIRPB1, INSRR, PKD2L1, DPP6, LRRC33 or SLC1A5 or the nucleic acid encodes one of the foregoing proteins.

[0287] In one example, the nucleic acid comprises the sequence of SEQ ID NO: 15, 1, 17, 337, 9, 13, 3, 5, 177, 331, 233, 227, 193, 339 or 225 or a sequence having at least about 70% identity thereto, or the protein comprises the sequence of SEQ ID NO: 16, 2, 18, 338, 10, 14, 4, 6, 178, 332, 234, 228, 194, 340 or 226 or a sequence having at least about 70% identity thereto.

[0288] In one example, the nucleic acid comprises the sequence of SEQ ID NO: 15 or a sequence having at least about 70% identity thereto, or the protein comprises the sequence of SEQ ID NO: 16 or a sequence having at least about 70% identity thereto.

[0289] In one example, the nucleic acid comprises the sequence of SEQ ID NO: 17 or a sequence having at least about 70% identity thereto, or the protein comprises the sequence of SEQ ID NO: 18 or a sequence having at least about 70% identity thereto.

[0290] In one example, the nucleic acid comprises the sequence of SEQ ID NO: 1 or a sequence having at least about 70% identity thereto, or the protein comprises the sequence of SEQ ID NO: 2 or a sequence having at least about 70% identity thereto.

[0291] In one example, the subject suffers from a cancer, and reduction in EPC numbers and/or activity in the subject reduces neovascularization in the cancer.

[0292] In one example, the protein comprises the sequence of SEQ ID NO: 2, 4, 6, 8, 10, 12, 14, 16 or 18 or a protein having at least about 70% identity thereto or the nucleic acid comprises the sequence of SEQ ID NO: 1, 3, 5, 7, 9, 11, 13, 15 or 17 or a nucleic acid having at least about 70% identity thereto.

[0293] In another example, the protein is selected from the group consisting of a protein that is a cell adhesion protein as set forth in Table 2, a transporter protein as set forth in Table 3, a growth factor as set forth in Table 4, a receptor as set forth in Table 5 and an enzyme as set forth in Table 6 or wherein the nucleic acid encodes any of the foregoing proteins.

[0294] In a further example, the protein is an immunoglobulin, cell adhesion protein comprising the sequence of SEQ ID NO: 2, 24 or 26 or a protein having at least about 70% identity thereto, or the nucleic acid encodes the immunoglobulin, cell adhesion protein and comprises the sequence of SEQ ID NO: 1, 23 or 25 or a nucleic acid having at least about 70% identity thereto.

[0295] Exemplary compounds include antibodies or polypeptides comprising antigen binding domains of antibodies. For example, the antibody or protein reduces EPC function and/or induces EPC death. In one example, the antibody or protein additionally comprises a toxic compound to thereby induce EPC death.

[0296] The present disclosure additionally provides an isolated antibody or polypeptide that binds specifically to a protein set forth in Table 1 or an immunogenic fragment or epitope thereof, or a polypeptide comprising antigen binding domain of an antibody that binds specifically to a protein set forth in Table 1 or an immunogenic fragment or epitope thereof when used in a method of the disclosure and/or packaged in an article of manufacture with instructions for use in a method of the disclosure.

[0297] The present disclosure also provides for use of an isolated antibody or polypeptide that binds specifically to a protein set forth in Table 1 or an immunogenic fragment or epitope thereof, or a polypeptide comprising antigen binding domain of an antibody that binds specifically to a protein set forth in Table 1 or an immunogenic fragment or epitope thereof in the manufacture of a medicament for treating, diagnosing or preventing an EPC-associated condition.

[0298] The present disclosure also provides an isolated antibody or polypeptide that binds specifically to a protein set forth in Table 1 or an immunogenic fragment or epitope thereof, or a polypeptide comprising antigen binding domain of an antibody that binds specifically to a protein set forth in Table 1 or an immunogenic fragment or epitope thereof for use in treating, diagnosing or preventing an EPC-associated condition.

[0299] The present disclosure additionally provides an isolated antibody or polypeptide, which binds specifically to a protein comprising the sequence of SEQ ID NO 2, 4, 6, 8, 10, 12, 14, 16 or 18 or a protein having at least about 70% identity thereto or an immunogenic fragment or epitope thereof, or a polypeptide comprising antigen binding domain of an antibody that binds specifically to a protein comprising the sequence of SEQ ID NO: 2, 4, 6, 8, 10, 12, 14, 16 or 18 or a protein having at least about 70% identity thereto.

[0300] Exemplary antibodies are chimeric antibodies, humanized antibodies or human antibodies.

[0301] Another example of the present disclosure provides a pharmaceutical composition comprising an antibody and/or polypeptide of the present disclosure and a pharmaceutically acceptable carrier or excipient. For example, the composition comprises an effective amount of the antibody or polypeptide.

[0302] Antibodies or proteins as described herein according to any example of the disclosure can be used in any method described herein requiring a compound that binds a protein.

[0303] Another example of the present disclosure provides for the use of an antibody and/or polypeptide of the present disclosure in medicine or in the manufacture of a medicament for administration to a subject in need thereof.

[0304] Another example of the present disclosure provides a nucleic acid encoding an antibody or polypeptide of the present disclosure. Such a nucleic acid may be included in an expression vector, e.g., in operable connection with a promoter.

[0305] Another example of the present disclosure provides a cell expressing an antibody or polypeptide of the present disclosure, e.g., a hybridoma or a transfectoma.

[0306] The present disclosure also provides a solid matrix or semi-solid matrix having immobilized thereon a compound (e.g., antibody or polypeptide comprising an antigen binding domain of an antibody that specifically binds to a protein set forth in Table 1) or a population of cells enriched for EPCs as described herein.

[0307] Another example of the present disclosure provides a method for identifying or isolating a compound that modulates EPC function, said method comprising identifying or isolating a compound that reduces expression and/or activity of a nucleic acid or protein set forth in Table 1 in an EPC.

[0308] Another example of the present disclosure provides a method for identifying or isolating a compound that binds an EPC, said method comprising identifying or isolating a compound that binds to a protein set forth in Table 1.

[0309] For example, the method additionally comprises determining a compound that enhances or reduces EPC activity and/or that induces EPC death, to thereby identify or isolate a compound that modulates EPC function.

[0310] For example, the nucleic acid or protein is expressed in, on or secreted from EPCs at a level at least 1.5 fold greater than in, on or secreted by human umbilical cord vascular endothelial cells (HUVECs), for example at a level at least 2 fold greater than in, on or secreted by HUVECs, such as at a level at least 3 or 4 or 5 fold greater than in, on or secreted by HUVECs.

[0311] For example, the nucleic acid or protein is expressed in, on or secreted by non-adherent CD133⁺ EPCs at a level at least 1.5 fold greater than in, on or secreted by HUVECs, for example at a level at least 2 fold greater than in, on or secreted by HUVECs, such as at a level at least 3 or 4 or 5 fold greater than in, on or secreted by HUVECs.

[0312] For example, the nucleic acid or protein is expressed in, on or secreted from EPCs at a level at least 1.5 fold greater than in, on or secreted by HUVECs and the nucleic acid comprises a sequence set forth in any one of SEQ ID NOs: 15, 1, 17, 9, 13, 3, 5, 7, 11, 19, 21, 23, 25, 27, 29, 31, 33, 35, 37, 39, 41, 43, 45, 47, 49, 51, 53, 55, 57, 59, 61, 63, 65, 67, 69, 71, 73, 75, 77, 79, 81, 83, 85, 87, 89, 91, 93, 95, 97, 99, 101, 103, 105, 107, 109, 111, 113, 115, 117, 119, 121, 123, 125, 127, 129, 131, 133, 135, 137, 139, 141, 143, 145, 147, 149, 151, 153, 155, 157, 159, 161, 163, 237, 239, 241, 243, 245, 247, 249, 251, 253, 255, 257, 259, 265, 267, 269, 271, 273, 275, 277, 279, 281, 305, 307, 309, 311, 313, 315, 317, 319, 321, 323, 325 or 327 or a nucleic acid having at least about 70% identity thereto, or the protein comprises a sequence set forth in any one of SEQ ID NOs: 16, 2, 18, 10, 14, 4, 6, 8, 12, 20, 22, 24, 26, 28, 30, 32, 34, 36, 38, 40, 42, 44, 46, 48, 50, 52, 54, 56, 58, 60, 62, 64, 66, 68, 70, 72, 74, 76, 78, 80, 82, 84, 86, 88, 90, 92, 94, 96, 98, 100, 102, 104, 106, 108, 110, 112, 114, 116, 118, 120, 122, 124, 126, 128, 130, 132, 134, 136, 138, 140, 142, 144, 146, 148, 150, 152, 154, 156, 158, 160, 162, 164, 238, 240, 242, 244, 246, 248, 250, 252, 254, 256, 258, 260, 266, 268, 270, 272, 274, 276, 278, 280, 282, 306, 308, 310, 312, 314, 316, 318, 320, 322, 324, 326 or 328 or a protein having at least about 70% identity thereto.

[0313] For example, the nucleic acid or protein is expressed in, on or secreted by non-adherent CD133⁺ EPCs at a level at least 1.5 fold greater than in, on or secreted by HUVECs and the nucleic acid comprises a sequence set forth in any one of SEQ ID NOs: 15, 1, 17, 9, 13, 3, 5, 7, 11, 19, 21, 23, 25, 27, 29, 31, 33, 35, 37, 39, 41, 43, 45, 47, 49, 51, 53, 55, 57, 59, 61, 63, 65, 67, 69, 71, 73, 75, 77, 79, 81, 83, 85, 87, 89, 91, 93, 95, 97, 99, 101, 103, 105, 107, 109, 111, 113, 115, 117, 119, 121, 123, 125, 127, 129, 131, 133, 135, 137, 139, 141, 143, 145, 147, 149, 151, 153, 155, 157, 159, 161, 163 or 327 or a nucleic acid having at least about 70% identity thereto, or the protein comprises a sequence set forth in any one of SEQ ID NOs: 16, 2, 18, 10, 14, 4, 6, 8, 12, 20, 22, 24, 26, 28, 30, 32, 34, 36, 38, 40, 42, 44, 46, 48, 50, 52, 54, 56, 58, 60, 62, 64, 66, 68, 70, 72, 74, 76, 78, 80, 82, 84, 86, 88, 90, 92, 94, 96, 98, 100, 102, 104, 106, 108, 110, 112, 114, 116, 118, 120, 122, 124, 126, 128, 130, 132, 134, 136, 138, 140, 142, 144, 146, 148, 150, 152, 154, 156, 158, 160, 162, 164 or 328 or a protein having at least about 70% identity thereto.

[0314] For example, the nucleic acid or protein is expressed in, on or secreted from EPCs at a level at least 2 fold greater than in, on or secreted by HUVECs and the nucleic acid comprises a sequence set forth in any one of SEQ ID NOs: 15, 1, 17, 9, 13, 3, 5, 7, 19, 21, 23, 27, 29, 31, 33, 37, 39, 43, 45, 47, 49, 51, 53, 55, 57, 59, 61, 63, 65, 67, 69, 71, 73, 75, 77, 79, 81, 83, 85, 87, 93, 95, 97, 99, 101, 103, 105, 111, 113, 115, 117, 119, 121, 123, 125, 131, 133, 135, 137, 139, 141, 143, 145, 155, 159, 161, 163, 237, 239, 241, 243, 245, 247, 249, 251, 265, 305, 307, 309, 311 or 327 or a nucleic acid having at least about 70% identity thereto, or the protein comprises a sequence set forth in any one of SEQ ID NOs: 16, 2, 18, 10, 14, 4, 6, 8, 20, 22, 24, 28, 30, 32, 34, 38, 40, 44, 46, 48, 50, 52, 54, 56, 58, 60, 62, 64, 66, 68, 70, 72, 74, 76, 78, 80, 82, 84, 86, 88, 94, 96, 98, 100, 102, 104, 106, 112, 114, 116, 118, 120, 122, 124, 126, 132, 134, 136, 138, 140, 142, 144, 146, 156, 160, 162, 164, 238, 240, 242, 244, 246, 248, 250, 252, 266, 306, 308, 310, 312 or 328 or a protein having at least about 70% identity thereto.

[0315] For example, the nucleic acid or protein is expressed in, on or secreted from non-adherent CD133⁺ EPCs at a level at least 2 fold greater than in, on or secreted from HUVECs and the nucleic acid comprises a sequence set forth in any one of SEQ ID NOs: 15, 1, 17, 9, 13, 3, 5, 7, 11, 19, 21, 23, 27, 29, 31, 33, 37, 39, 43, 45, 47, 49, 51, 53, 55, 57, 59, 61, 63, 65, 67, 69, 71, 73, 75, 77, 79, 81, 83, 85, 87, 93, 95, 97, 99, 101, 103, 105, 111, 113, 115, 117, 119, 121, 123, 125, 131, 133, 135, 137, 139, 141, 143, 145, 155, 159, 161, 163 or 327 or a nucleic acid having at least about 70% identity thereto, or the protein comprises a sequence set forth in any one of SEQ ID NOs: 16, 2, 18, 10, 14, 4, 6, 8, 20, 22, 24, 28, 30, 32, 34, 38, 40, 46, 48, 50, 52, 56, 58, 60, 62, 64, 66, 68, 70, 72, 74, 76, 78, 80, 82, 100, 104, 112, 114, 120, 122, 124, 126, 132, 134, 136, 138, 140, 162, 164, 238, 306 or 328 or a protein having at least about 70% identity thereto.

[0316] For example, the nucleic acid or protein is expressed in, on or secreted from EPCs at a level at least 3 fold greater than in, on or secreted by HUVECs and the nucleic acid comprises a sequence set forth in any one of SEQ ID NOs: 15, 1, 17, 9, 13, 3, 5, 7, 19, 21, 23, 27, 29, 31, 33, 37, 39, 43, 45, 47, 49, 51, 53, 55, 57, 59, 61, 63, 65, 67, 69, 71, 73, 75, 77, 79, 81, 83, 85, 87, 93, 95, 97, 99, 101, 103, 105, 111, 113, 115, 117, 119, 121, 123, 125, 131, 133, 135, 137, 139, 141, 143, 145, 155, 159, 161, 163 or 327 or a nucleic acid having at least about 70% identity thereto, or the protein comprises a sequence set forth in any one of SEQ ID NOs: 16, 2, 18, 10, 14, 4, 6, 8, 20, 22, 24, 28, 30, 32, 34, 38, 40, 44, 46, 48, 50, 52, 54, 56, 58, 60, 62, 64, 66, 68, 70, 72, 74, 76, 78, 80, 82, 84, 86, 88, 94, 96, 98, 100, 102, 104, 106, 112, 114, 116, 118, 120, 122, 124, 126, 132, 134, 136, 138, 140, 142, 144, 146, 156, 160, 162, 164 or 328 or a protein having at least about 70% identity thereto.

[0317] For example, the nucleic acid or protein is expressed in, on or secreted from non-adherent CD133⁺ EPCs at a level at least 3 fold greater than in, on or secreted from HUVECs and the nucleic acid comprises a sequence set forth in any one of SEQ ID NOs: 15, 1, 17, 9, 13, 3, 7, 19, 21, 23, 27, 29, 31, 33, 37, 39, 45, 47, 49, 51, 55, 57, 59, 61, 63, 65, 67, 69, 71, 73, 75, 77, 79, 81, 99, 103, 111, 113, 119, 121, 123, 125, 131, 133, 135, 137, 139, 161, 163, 237, 305 or 327 or a nucleic acid having at least about 70% identity thereto, or the protein comprises a sequence set forth in any one of SEQ ID NOs: 16, 2, 18, 10, 14, 4, 8, 18, 20, 22, 24, 28, 30, 32, 34, 38, 40, 46, 48, 50, 52, 56, 58, 60, 62, 64, 66, 68, 70, 72, 74, 76, 78, 80, 82, 100, 104, 112, 114, 120, 122, 124, 126, 132, 134, 136, 138, 140, 162, 164, 238, 306 or 328 or a protein having at least about 70% identity thereto.

[0318] For example, the nucleic acid or protein is expressed in, on or secreted from non-adherent CD133⁺ EPCs at a level at least 4 fold greater than in, on or secreted from HUVECs and the nucleic acid comprises a sequence set forth in any one of SEQ ID NOs: 15, 1, 17, 13, 7, 19, 21, 27, 29, 37, 39, 45, 47, 55, 57, 59, 61, 63, 65, 67, 69, 71, 73, 75, 77, 79, 99, 103, 111, 121, 123, 125, 131, 133, 135, 161, 163 or 327 or a nucleic acid having at least about 70% identity thereto, or the protein comprises a sequence set forth in any one of SEQ ID NOs: 16, 2, 18, 14, 8, 20, 22, 28, 30, 40, 46, 48, 56, 58, 60, 62, 64, 66, 68, 104, 122, 124, 126, 132, 134, 162, 164 or 328 or a protein having at least about 70% identity thereto.

[0319] For example, the nucleic acid or protein is expressed in, on or secreted from non-adherent CD133⁺ EPCs at a level at least 5 fold greater than in, on or secreted from HUVECs and the nucleic acid comprises a sequence set forth in any one of SEQ ID NOs: 15, 1, 7, 19, 27, 29, 39, 45, 47, 55, 57, 59, 61, 63, 65, 67, 103, 121, 123, 125, 131, 133, 161, 163 or 327 or a nucleic acid having at least about 70% identity thereto, or the protein comprises a sequence set forth in any one of SEQ ID NOs: 16, 2, 8, 28, 32, 36, 38, 46, 48, 50, 52, 54, 56, 58, 102, 104, 122, 124, 126, 132, 134, 162, 164 or 328 or a protein having at least about 70% identity thereto.

[0320] For example, the nucleic acid or protein is expressed in, on or secreted from non-adherent CD133⁺ EPCs at a level at least 6 fold greater than in, on or secreted from HUVECs and the nucleic acid comprises a sequence set forth in any one of SEQ ID NOs: 15, 1, 7, 19, 39, 45, 47, 55, 57, 59, 61, 63, 121, 123, 125, 133, 161, 163 or 327 or a nucleic acid having at least about 70% identity thereto, or the protein comprises a sequence set forth in any one of SEQ ID NOs: 16, 2, 8, 20, 40, 46, 48, 56, 58, 60, 62, 64, 122, 124, 126, 134, 162, 164 or 328 or a protein having at least about 70% identity thereto.

[0321] In one example, the level of expression is determined using a microarray.

[0322] In one example, a protein or nucleic acid has one or more (e.g., has all) of the following characteristics:
[0323] Is expressed on EPCs and has low, or undetectable expression on endothelial cells;
[0324] A protein is expressed on the cell surface; and
[0325] A protein contains a transmembrane domain.

[0326] In one example, the protein is selected from the group consisting of DSG2, EMB, EMR2, NKG7, ADCY7, SLC39A8, TM7SF3, NCSTN, SIRPB1, INSRR, PKD2L1, DPP6, LRRC33 or SLC1A5 or the nucleic acid encodes one of the foregoing proteins.

[0327] In one example, the nucleic acid comprises the sequence of SEQ ID NO: 15, 1, 17, 337, 9, 13, 3, 5, 177, 331, 233, 227, 193, 339 or 225 or a sequence having at least about 70% identity thereto, or the protein comprises the sequence of SEQ ID NO: 16, 2, 18, 338, 10, 14, 4, 6, 178, 332, 234, 228, 194, 340 or 226 or a sequence having at least about 70% identity thereto.

[0328] In one example, the nucleic acid comprises the sequence of SEQ ID NO: 15 or a sequence having at least about 70% identity thereto, or the protein comprises the sequence of SEQ ID NO: 16 or a sequence having at least about 70% identity thereto.

[0329] In one example, the nucleic acid comprises the sequence of SEQ ID NO: 17 or a sequence having at least about 70% identity thereto, or the protein comprises the sequence of SEQ ID NO: 18 or a sequence having at least about 70% identity thereto.

[0330] In one example, the nucleic acid comprises the sequence of SEQ ID NO: 1 or a sequence having at least about 70% identity thereto, or the protein comprises the sequence of SEQ ID NO: 2 or a sequence having at least about 70% identity thereto.

[0331] In one example, the protein comprises the sequence of SEQ ID NO: 2, 4, 6, 8, 10, 12, 14, 16 or 18 or a protein having at least about 70% identity thereto or the nucleic acid comprises the sequence of SEQ ID NO: 1, 3, 5, 7, 9, 11, 13, 15 or 17 or a nucleic acid having at least about 70% identity thereto.

[0332] In another example, the protein is selected from the group consisting of a protein that is a cell adhesion protein as set forth in Table 2, a transporter protein as set forth in Table 3, a growth factor as set forth in Table 4, a receptor as set forth in Table 5 and an enzyme as set forth in Table 6 or wherein the nucleic acid encodes any of the foregoing proteins.

[0333] In a further example, the protein is an immunoglobulin, cell adhesion protein comprising the sequence of SEQ ID NO: 2, 24 or 26 or a protein having at least about 70% identity thereto, or the nucleic acid encodes the immunoglobulin, cell adhesion protein and comprises the sequence of SEQ ID NO: 1, 23 or 25 or a nucleic acid having at least about 70% identity thereto.

[0334] Examples of the present disclosure also encompasses classes of proteins or nucleic acids expressed in, on or secreted by non-adherent CD133⁺ EPCs at a level at least 7 fold or 8 fold or 9 fold or 14 fold or 18 fold greater than in, on or secreted by HUVECs. The skilled artisan will be capable of determining such classes of proteins or nucleic acids and/or proteins based on the disclosure herein, e.g., in Tables 7 to 9, ad those disclosures shall be taken to provide explicit support for such classes of nucleic acids and/or proteins.

### BRIEF DESCRIPTION OF THE DRAWINGS

[0335] FIG. 1 is a graphical representation showing hierarchical clustering for gene expression for CD133+ cells freshly isolated from human umbilical cord blood mononuclear cells and cultured for 4 days in complete culture medium (EPCs) or endothelial cells isolated from human umbilical cords and cultured to 2 passages or less in complete culture medium (HUVEC). The overall transcriptional profiles of the EPCs are more similar to each other than to the profile for typical HUVEC. The heat map depicts gene expression.

[0336] FIG. 2 Panel A is a series of graphical representations showing expression of EMR2 on EPCs (left panel) and HUVECs (right panel). The dashed line indicates the level of binding of isotype control antibody, and the solid line indicates the level of binding of anti-EMR2 antibody (clone 2A1, targeting the stalk region of EMR2 only). The bar represents cells binding less than 1% of isotype control antibody.

[0337] FIG. 2 Panel B is a series of graphical representations showing expression of EMR2 on U937 myeloid cells (left panel) and Jurkat T cells (right panel). The dashed line indicates the level of binding of isotype control antibody, and the solid line indicates the level of binding of anti-EMR2 antibody. The bar represents cells binding less than 1% of isotype control antibody.

[0338] FIG. 3 Panel A is a series of graphical representations showing expression of DSG2 on EPCs (left panel) and HUVECs (right panel). The dashed line indicates the level of binding of isotype control antibody, and the solid line indicates the level of binding of anti-DSG2 antibody. The bar represents cells binding less than 1% of isotype control antibody.

[0339] FIG. 3 Panel B is a series of graphical representations showing expression of CD133 and CD117 on freshly isolated human peripheral blood mononuclear cells (PBMNCs) (left panel) and DSG2 expression on CD133⁺CD117 double positive PBMNCs (right panel). The dashed line indicates the level of binding of isotype control antibody, and the solid line indicates the level of binding of anti-DSG2 antibody.

[0340] FIG. 4 Panel A is a series of graphical representations showing that when an anti-DSG2 monoclonal antibody is used to pull down DSG2 expressing cells from freshly isolated umbilical cord blood (UCB) it enriches for cells that are CD34⁺ and CD31⁺ progenitor and vascular markers, respectively.

[0341] FIG. 4 Panel B is a series of graphical representations showing that when an anti-CD133 monoclonal antibody is used to pull down CD133 expressing cells from freshly isolated peripheral blood it also enriches for cells that are CD34+ and CD31+ but that two populations appear to be isolated.

[0342] FIG. 5 is a graphical representation showing that when an anti-DSG2 monoclonal antibody is used to pull down DSG2 expressing cells from freshly isolated human umbilical cord blood (UCB) and then cultured for 4 days in EC supportive media (EGM-2+ supplements) it enriches for cells that are (A) DSG2 and CD133^{dim} (B) CD34⁺ and CD45^{dim} and (C) VEGFR2 and CD31

[0343] FIG. 6 is a series of graphical representations showing expression of DSG2 on C32 melanoma cells (left panel) and MM200 melanoma cells (right panel). The dashed line indicates the level of binding of isotype control antibody, and the solid line indicates the level of binding of anti-DSG2 antibody.

[0344] FIG. 7 includes a series of representations with the left panels showing HUVEC (labelled with DiI-acetylated low density lipoprotein and C32 or MM200 melanoma cells (labelled with CFSE-DA) co-cultured in the 3-dimensional matrix Matrigel® and the formation of tube-like structures from 7 h post seeding. From one experiment with triplicate samples, quantification of the number of tubes formed per field of view at 12 hours suggests an increase in tube number when the DSG2⁺ C32 cells are co-cultured with HUVEC in Matrigel® (right graph). Co-culture of MM200 melanoma cells with HUVEC does not increase tube numbers above HUVEC alone.

[0345] FIG. 8 contains a series of graphical representations showing results of a representative experiment in which DSG2 is knocked down in C32 cells. Panel A shows changes in expression of DSG2 as detected by qPCR in the presence of various siRNAs (as indicated). Panel B shows expression of DSG2 as detected by flow cytometry in the presence of various siRNAs (as indicated; mean±sd). This result has been repeatable in 3 separate experiments.

[0346] FIG. 9 comprises a series of representations showing results of knockdown of DSG2 expression. The left panels are representative images showing HUVEC (labelled with DiI-acetylated low density lipoprotein) and C32 melanoma cells without or with knockdown of DSG2 by siRNA (unlabelled) co-cultured in the 3-dimensional matrix Matrigel® and the formation of tube-like structures at 12 h post seeding. From one experiment with triplicate samples, quantification of the number of tubes formed per field of view at 12 hours suggests a decrease increase in tube number when the C32 cells have DSG2 knockdown and co-cultured with HUVEC in Matrigel (right graph).

[0347] FIG. 10 includes copies of two photomicrographs showing representative images of DSG2 expression on the vasculature of paraffin embedded human tissue (cells expressing DSG2 are indicated by arrows). The DSG2 of the ovary vasculature is stained with DAB and sections counter stained with hematoxylin for nuclei with an enlarged image depicted in the right panel.

[0348] FIG. 11 is a graphical representation showing expression of DSG2 on freshly isolated mouse bone marrow cells. The dashed lines indicate the level of autofluorescence of the cells as well as the binding of the secondary antibody alone, and the solid line indicates the level of binding of anti-DSG2 antibody. The bar represents cells binding less than 1% of secondary alone control.

[0349] FIG. 12 is a representative image of DSG2 expression in on the melanoma cells in a spontaneous mouse model (Tyr⁻Cre⁺:Braf^{V600E/+};Pten^{del/del}) of melanoma. The DSG2 of the mouse tissue paraffin embedded section is stained with an alkaline phosphatase/red chromagen system. Sections were counter stained with hematoxylin for nuclei with the secondary antibody alone depicted in the left panel.

[0350] FIG. 13 includes a series of graphical representations showing characterization expanded the expansion CD133⁺ isolated cells from human umbilical cord blood. Panel A shows the fold expansion of CD133⁺ isolated cells from human umbilical cord blood in StemSpan media (Stem Cell Technologies) in BD tissue culture plates at a density ˜7.5×10⁵ cells/ml. The data represent the mean+/−sem from 5 independent donor experiments. Panel B shows expression of DSG2 on EPCs expanded for 7 days in culture. The left line indicates the level of binding of isotype control antibody (iso), and the right line indicates the level of binding of anti-DSG2 antibody (as indicated). Panel C shows expression of EMR2 on EPCs expanded for 7 days in culture. The left line indicates the level of binding of isotype control antibody (iso), and the right line indicates the level of binding of anti-EMR2 antibody (as indicated).

### KEY TO SEQUENCE LISTING

[0351] SEQ ID NO: 1 is a nucleotide sequence of a Homo sapiens embigin homolog;

[0352] SEQ ID NO: 2 is an amino acid sequence of a Homo sapiens embigin homolog;

[0353] SEQ ID NO: 3 is a nucleotide sequence of a Homo sapiens solute carrier family 39 (zinc transporter), member 8;

[0354] SEQ ID NO: 4 is an amino acid sequence of a Homo sapiens solute carrier family 39 (zinc transporter), member 8;

[0355] SEQ ID NO: 5 is a nucleotide sequence of a Homo sapiens transmembrane 7 superfamily member 3;

[0356] SEQ ID NO: 6 is an amino acid sequence of a Homo sapiens transmembrane 7 superfamily member 3;

[0357] SEQ ID NO: 7 is a nucleotide sequence of a Homo sapiens plexin C1;

[0358] SEQ ID NO: 8 is an amino acid sequence of a Homo sapiens plexin C1;

[0359] SEQ ID NO: 9 is a nucleotide sequence of a Homo sapiens natural killer cell group 7 sequence;

[0360] SEQ ID NO: 10 is an amino acid sequence of a Homo sapiens natural killer cell group 7 sequence;

[0361] SEQ ID NO: 11 is a nucleotide sequence of a Homo sapiens olfactory receptor, family 52, subfamily B, member 6;

[0362] SEQ ID NO: 12 is an amino acid sequence of a Homo sapiens olfactory receptor, family 52, subfamily B, member 6;

[0363] SEQ ID NO: 13 is a nucleotide sequence of a Homo sapiens adenylate cyclase 7;

[0364] SEQ ID NO: 14 is an amino acid sequence of a Homo sapiens adenylate cyclase 7;

[0365] SEQ ID NO: 15 is a nucleotide sequence of a Homo sapiens desmoglein 2;

[0366] SEQ ID NO: 16 is an amino acid sequence of a Homo sapiens desmoglein 2;

[0367] SEQ ID NO: 17 is a nucleotide sequence of a Homo sapiens egf-like module containing, mucin-like, hormone receptor-like 2;

[0368] SEQ ID NO: 18 is an amino acid sequence of a Homo sapiens egf-like module containing, mucin-like, hormone receptor-like 2;

[0369] SEQ ID NO: 19 is a nucleotide sequence of a Homo sapiens solute carrier family 15 (H+/peptide transporter), member 2;

[0370] SEQ ID NO: 20 is an amino acid sequence of a Homo sapiens solute carrier family 15 (H+/peptide transporter), member 2;

[0371] SEQ ID NO: 21 is a nucleotide sequence of a Homo sapiens solute carrier family 16, member 6 (monocarboxylic acid transporter 7);

[0372] SEQ ID NO: 22 is an amino acid sequence of a Homo sapiens solute carrier family 16, member 6 (monocarboxylic acid transporter 7);

[0373] SEQ ID NO: 23 is a nucleotide sequence of a Homo sapiens sialic acid binding

[0374] Ig-like lectin 10;

[0375] SEQ ID NO: 24 is an amino acid sequence of a Homo sapiens sialic acid binding Ig-like lectin 10;

[0376] SEQ ID NO: 25 is a nucleotide sequence of a Homo sapiens sialic acid binding Ig-like lectin 6;

[0377] SEQ ID NO: 26 is an amino acid sequence of a Homo sapiens sialic acid binding Ig-like lectin 6;

[0378] SEQ ID NO: 27 is a nucleotide sequence of a Homo sapiens amphiregulin;

[0379] SEQ ID NO: 28 is an amino acid sequence of a Homo sapiens amphiregulin;

[0380] SEQ ID NO: 29 is a nucleotide sequence of a Homo sapiens integral membrane protein 2A;

[0381] SEQ ID NO: 30 is an amino acid sequence of a Homo sapiens integral membrane protein 2A;

[0382] SEQ ID NO: 31 is a nucleotide sequence of a Homo sapiens glycoprotein M6B;

[0383] SEQ ID NO: 32 is an amino acid sequence of a Homo sapiens glycoprotein M6B;

[0384] SEQ ID NO: 33 is a nucleotide sequence of a Homo sapiens cannabinoid receptor 2 (macrophage);

[0385] SEQ ID NO: 34 is an amino acid sequence of a Homo sapiens cannabinoid receptor 2 (macrophage);

[0386] SEQ ID NO: 35 is a nucleotide sequence of a Homo sapiens protease, serine, 21 (testisin);

[0387] SEQ ID NO: 36 is an amino acid sequence of a Homo sapiens protease, serine, 21 (testisin);

[0388] SEQ ID NO: 37 is a nucleotide sequence of a Homo sapiens neuregulin 4;

[0389] SEQ ID NO: 38 is an amino acid sequence of a Homo sapiens neuregulin 4;

[0390] SEQ ID NO: 39 is a nucleotide sequence of a Homo sapiens epithelial mitogen homolog (mouse);

[0391] SEQ ID NO: 40 is an amino acid sequence of a Homo sapiens epithelial mitogen homolog (mouse);

[0392] SEQ ID NO: 41 is a nucleotide sequence of a Homo sapiens rhomboid domain containing 1;

[0393] SEQ ID NO: 42 is an amino acid sequence of a Homo sapiens rhomboid domain containing 1;

[0394] SEQ ID NO: 43 is a nucleotide sequence of a Homo sapiens ATP-binding cassette, sub-family C(CFTR/MRP), member 4;

[0395] SEQ ID NO: 44 is an amino acid sequence of a Homo sapiens ATP-binding cassette, sub-family C(CFTR/MRP), member 4;

[0396] SEQ ID NO: 45 is a nucleotide sequence of a Homo sapiens sortilin-related receptor, L(DLR class) A repeats-containing;

[0397] SEQ ID NO: 46 is an amino acid sequence of a Homo sapiens sortilin-related receptor, L(DLR class) A repeats-containing;

[0398] SEQ ID NO: 47 is a nucleotide sequence of a Homo sapiens solute carrier family 8 (sodium/calcium exchanger), member 1;

[0399] SEQ ID NO: 48 is an amino acid sequence of a Homo sapiens solute carrier family 8 (sodium/calcium exchanger), member 1;

[0400] SEQ ID NO: 49 is a nucleotide sequence of a Homo sapiens solute carrier family 22 (organic cation/carnitine transporter), member 16;

[0401] SEQ ID NO: 50 is an amino acid sequence of a Homo sapiens solute carrier family 22 (organic cation/carnitine transporter), member 16;

[0402] SEQ ID NO: 51 is a nucleotide sequence of a Homo sapiens solute carrier family 24 (sodium/potassium/calcium exchanger), member 3;

[0403] SEQ ID NO: 52 is an amino acid sequence of a Homo sapiens solute carrier family 24 (sodium/potassium/calcium exchanger), member 3;

[0404] SEQ ID NO: 53 is a nucleotide sequence of a Homo sapiens solute carrier family 2 (facilitated glucose/fructose transporter), member 5;

[0405] SEQ ID NO: 54 is an amino acid sequence of a Homo sapiens solute carrier family 2 (facilitated glucose/fructose transporter), member 5;

[0406] SEQ ID NO: 55 is a nucleotide sequence of a Homo sapiens NCK-associated protein 1-like;

[0407] SEQ ID NO: 56 is an amino acid sequence of a Homo sapiens NCK-associated protein 1-like;

[0408] SEQ ID NO: 57 is a nucleotide sequence of a Homo sapiens ecotropic viral integration site 2B;

[0409] SEQ ID NO: 58 is an amino acid sequence of a Homo sapiens ecotropic viral integration site 2B;

[0410] SEQ ID NO: 59 is a nucleotide sequence of a Homo sapiens potassium voltage-gated channel;

[0411] SEQ ID NO: 60 is an amino acid sequence of a Homo sapiens potassium voltage-gated channel;

[0412] SEQ ID NO: 61 is a nucleotide sequence of a Homo sapiens purinergic receptor P2Y, G-protein coupled, 14;

[0413] SEQ ID NO: 62 is an amino acid sequence of a Homo sapiens purinergic receptor P2Y, G-protein coupled, 14;

[0414] SEQ ID NO: 63 is a nucleotide sequence of a Homo sapiens 5-hydroxytryptamine (serotonin) receptor 1F;

[0415] SEQ ID NO: 64 is an amino acid sequence of a Homo sapiens 5-hydroxytryptamine (serotonin) receptor 1F;

[0416] SEQ ID NO: 65 is a nucleotide sequence of a Homo sapiens T cell receptor associated transmembrane adaptor 1;

[0417] SEQ ID NO: 66 is an amino acid sequence of a Homo sapiens T cell receptor associated transmembrane adaptor 1;

[0418] SEQ ID NO: 67 is a nucleotide sequence of a Homo sapiens G protein-coupled receptor 183;

[0419] SEQ ID NO: 68 is an amino acid sequence of a Homo sapiens G protein-coupled receptor 183;

[0420] SEQ ID NO: 69 is a nucleotide sequence of a Homo sapiens olfactory receptor, family 13, subfamily D, member 1;

[0421] SEQ ID NO: 70 is an amino acid sequence of a Homo sapiens olfactory receptor, family 13, subfamily D, member 1;

[0422] SEQ ID NO: 71 is a nucleotide sequence of a Homo sapiens V-set and immunoglobulin domain containing 4;

[0423] SEQ ID NO: 72 is an amino acid sequence of a Homo sapiens V-set and immunoglobulin domain containing 4;

[0424] SEQ ID NO: 73 is a nucleotide sequence of a Homo sapiens taste receptor, type 2, member 4;

[0425] SEQ ID NO: 74 is an amino acid sequence of a Homo sapiens taste receptor, type 2, member 4;

[0426] SEQ ID NO: 75 is a nucleotide sequence of a Homo sapiens G protein-coupled receptor 18;

[0427] SEQ ID NO: 76 is an amino acid sequence of a Homo sapiens G protein-coupled receptor 18;

[0428] SEQ ID NO: 77 is a nucleotide sequence of a Homo sapiens taste receptor, type 2, member 3;

[0429] SEQ ID NO: 78 is an amino acid sequence of a Homo sapiens taste receptor, type 2, member 3;

[0430] SEQ ID NO: 79 is a nucleotide sequence of a Homo sapiens major histocompatibility complex, class I-related;

[0431] SEQ ID NO: 80 is an amino acid sequence of a Homo sapiens major histocompatibility complex, class I-related;

[0432] SEQ ID NO: 81 is a nucleotide sequence of a Homo sapiens G protein-coupled receptor 34;

[0433] SEQ ID NO: 82 is an amino acid sequence of a Homo sapiens G protein-coupled receptor 34;

[0434] SEQ ID NO: 83 is a nucleotide sequence of a Homo sapiens potassium voltage-gated channel, shaker-related subfamily, beta member 2;

[0435] SEQ ID NO: 84 is an amino acid sequence of a Homo sapiens potassium voltage-gated channel, shaker-related subfamily, beta member 2;

[0436] SEQ ID NO: 85 is a nucleotide sequence of a Homo sapiens potassium voltage-gated channel, Isk-related family, member 3;

[0437] SEQ ID NO: 86 is an amino acid sequence of a Homo sapiens potassium voltage-gated channel, Isk-related family, member 3;

[0438] SEQ ID NO: 87 is a nucleotide sequence of a Homo sapiens linker for activation of T cells family, member 2;

[0439] SEQ ID NO: 88 is an amino acid sequence of a Homo sapiens linker for activation of T cells family, member 2;

[0440] SEQ ID NO: 89 is a nucleotide sequence of a Homo sapiens megalencephalic leukoencephalopathy with subcortical cysts 1;

[0441] SEQ ID NO: 90 is an amino acid sequence of a Homo sapiens megalencephalic leukoencephalopathy with subcortical cysts 1;

[0442] SEQ ID NO: 91 is a nucleotide sequence of a Homo sapiens ectonucleotide pyrophosphatase/phosphodiesterase 5 (putative function);

[0443] SEQ ID NO: 92 is an amino acid sequence of a Homo sapiens ectonucleotide pyrophosphatase/phosphodiesterase 5 (putative function);

[0444] SEQ ID NO: 93 is a nucleotide sequence of a Homo sapiens feline leukemia virus subgroup C cellular receptor 1;

[0445] SEQ ID NO: 94 is an amino acid sequence of a Homo sapiens feline leukemia virus subgroup C cellular receptor 1;

[0446] SEQ ID NO: 95 is a nucleotide sequence of a Homo sapiens G protein-coupled receptor 65;

[0447] SEQ ID NO: 96 is an amino acid sequence of a Homo sapiens G protein-coupled receptor 65;

[0448] SEQ ID NO: 97 is a nucleotide sequence of a Homo sapiens opsin 3;

[0449] SEQ ID NO: 98 is an amino acid sequence of a Homo sapiens opsin 3;

[0450] SEQ ID NO: 99 is a nucleotide sequence of a Homo sapiens taste receptor, type 2, member 13;

[0451] SEQ ID NO: 100 is an amino acid sequence of a Homo sapiens taste receptor, type 2, member 13;

[0452] SEQ ID NO: 101 is a nucleotide sequence of a Homo sapiens claudin 20;

[0453] SEQ ID NO: 102 is an amino acid sequence of a Homo sapiens claudin 20;

[0454] SEQ ID NO: 103 is a nucleotide sequence of a Homo sapiens solute carrier family 1 (glial high affinity glutamate transporter), member 3;

[0455] SEQ ID NO: 104 is an amino acid sequence of a Homo sapiens solute carrier family 1 (glial high affinity glutamate transporter), member 3;

[0456] SEQ ID NO: 105 is a nucleotide sequence of a Homo sapiens solute carrier family 1 (glutamate/neutral amino acid transporter), member 4;

[0457] SEQ ID NO: 106 is an amino acid sequence of a Homo sapiens solute carrier family 1 (glutamate/neutral amino acid transporter), member 4;

[0458] SEQ ID NO: 107 is a nucleotide sequence of a Homo sapiens claudin 10;

[0459] SEQ ID NO: 108 is an amino acid sequence of a Homo sapiens claudin 10;

[0460] SEQ ID NO: 109 is a nucleotide sequence of a Homo sapiens ADAM metallopeptidase with thrombospondin type 1 motif, 2;

[0461] SEQ ID NO: 110 is an amino acid sequence of a Homo sapiens ADAM metallopeptidase with thrombospondin type 1 motif, 2;

[0462] SEQ ID NO: 111 is a nucleotide sequence of a Homo sapiens thromboxane A synthase 1 (platelet);

[0463] SEQ ID NO: 112 is an amino acid sequence of a Homo sapiens thromboxane A synthase 1 (platelet);

[0464] SEQ ID NO: 113 is a nucleotide sequence of a Homo sapiens lysosomal protein transmembrane 5;

[0465] SEQ ID NO: 114 is an amino acid sequence of a Homo sapiens lysosomal protein transmembrane 5;

[0466] SEQ ID NO: 115 is a nucleotide sequence of a Homo sapiens vesicle-associated membrane protein 8 (endobrevin);

[0467] SEQ ID NO: 116 is an amino acid sequence of a Homo sapiens vesicle-associated membrane protein 8 (endobrevin);

[0468] SEQ ID NO: 117 is a nucleotide sequence of a Homo sapiens A kinase (PRKA) anchor protein 7;

[0469] SEQ ID NO: 118 is an amino acid sequence of a Homo sapiens A kinase (PRKA) anchor protein 7;

[0470] SEQ ID NO: 119 is a nucleotide sequence of a Homo sapiens sema domain, immunoglobulin domain (Ig), short basic domain, secreted, (semaphorin) 3C;

[0471] SEQ ID NO: 120 is an amino acid sequence of a Homo sapiens sema domain, immunoglobulin domain (Ig), short basic domain, secreted, (semaphorin) 3C;

[0472] SEQ ID NO: 121 is a nucleotide sequence of a Homo sapiens solute carrier family 38, member 1;

[0473] SEQ ID NO: 122 is an amino acid sequence of a Homo sapiens solute carrier family 38, member 1;

[0474] SEQ ID NO: 123 is a nucleotide sequence of a Homo sapiens CD302 molecule;

[0475] SEQ ID NO: 124 is an amino acid sequence of a Homo sapiens CD302 molecule;

[0476] SEQ ID NO: 125 is a nucleotide sequence of a Homo sapiens phospholipase B domain containing 1;

[0477] SEQ ID NO: 126 is an amino acid sequence of a Homo sapiens phospholipase B domain containing 1;

[0478] SEQ ID NO: 127 is a nucleotide sequence of a Homo sapiens lysyl oxidase-like 3;

[0479] SEQ ID NO: 128 is an amino acid sequence of a Homo sapiens lysyl oxidase-like 3;

[0480] SEQ ID NO: 129 is a nucleotide sequence of a Homo sapiens family with sequence similarity 46, member C;

[0481] SEQ ID NO: 130 is an amino acid sequence of a Homo sapiens family with sequence similarity 46, member C;

[0482] SEQ ID NO: 131 is a nucleotide sequence of a Homo sapiens microfibrillar-associated protein 4;

[0483] SEQ ID NO: 132 is an amino acid sequence of a Homo sapiens microfibrillar-associated protein 4;

[0484] SEQ ID NO: 133 is a nucleotide sequence of a Homo sapiens IQ motif containing B1;

[0485] SEQ ID NO: 134 is an amino acid sequence of a Homo sapiens IQ motif containing B1;

[0486] SEQ ID NO: 135 is a nucleotide sequence of a Homo sapiens fibrillin 2;

[0487] SEQ ID NO: 136 is an amino acid sequence of a Homo sapiens fibrillin 2;

[0488] SEQ ID NO: 137 is a nucleotide sequence of a Homo sapiens osteoglycin;

[0489] SEQ ID NO: 138 is an amino acid sequence of a Homo sapiens osteoglycin;

[0490] SEQ ID NO: 139 is a nucleotide sequence of a Homo sapiens osteomodulin;

[0491] SEQ ID NO: 140 is an amino acid sequence of a Homo sapiens osteomodulin;

[0492] SEQ ID NO: 141 is a nucleotide sequence of a Homo sapiens asporin;

[0493] SEQ ID NO: 142 is an amino acid sequence of a Homo sapiens asporin;

[0494] SEQ ID NO: 143 is a nucleotide sequence of a Homo sapiens pregnancy-zone protein;

[0495] SEQ ID NO: 144 is an amino acid sequence of a Homo sapiens pregnancy-zone protein;

[0496] SEQ ID NO: 145 is a nucleotide sequence of a Homo sapiens hereditary sensory neuropathy, type II (WNK1);

[0497] SEQ ID NO: 146 is an amino acid sequence of a Homo sapiens hereditary sensory neuropathy, type II (WNK1);

[0498] SEQ ID NO: 147 is a nucleotide sequence of a Homo sapiens serpin peptidase inhibitor, clade I (pancpin), member 2;

[0499] SEQ ID NO: 148 is an amino acid sequence of a Homo sapiens serpin peptidase inhibitor, clade I (pancpin), member 2;

[0500] SEQ ID NO: 149 is a nucleotide sequence of a Homo sapiens extracellular matrix protein 2, female organ and adipocyte specific;

[0501] SEQ ID NO: 150 is an amino acid sequence of a Homo sapiens extracellular matrix protein 2, female organ and adipocyte specific;

[0502] SEQ ID NO: 151 is a nucleotide sequence of a Homo sapiens ER lipid raft associated 1;

[0503] SEQ ID NO: 152 is an amino acid sequence of a Homo sapiens ER lipid raft associated 1;

[0504] SEQ ID NO: 153 is a nucleotide sequence of a Homo sapiens cadherin, EGF LAG seven-pass G-type receptor 2 (flamingo homolog, Drosophila);

[0505] SEQ ID NO: 154 is an amino acid sequence of a Homo sapiens cadherin, EGF LAG seven-pass G-type receptor 2 (flamingo homolog, Drosophila);

[0506] SEQ ID NO: 155 is a nucleotide sequence of a Homo sapiens neuroplastin;

[0507] SEQ ID NO: 156 is an amino acid sequence of a Homo sapiens neuroplastin;

[0508] SEQ ID NO: 157 is a nucleotide sequence of a Homo sapiens chromosome 20 open reading frame 3;

[0509] SEQ ID NO: 158 is an amino acid sequence of a Homo sapiens chromosome 20 open reading frame 3;

[0510] SEQ ID NO: 159 is a nucleotide sequence of a Homo sapiens gamma-aminobutyric acid (GABA) A receptor, alpha 3;

[0511] SEQ ID NO: 160 is an amino acid sequence of a Homo sapiens gamma-aminobutyric acid (GABA) A receptor, alpha 3;

[0512] SEQ ID NO: 161 is a nucleotide sequence of a Homo sapiens desmoglein 3 (pemphigus vulgaris antigen);

[0513] SEQ ID NO: 162 is an amino acid sequence of a Homo sapiens desmoglein 3 (pemphigus vulgaris antigen);

[0514] SEQ ID NO: 163 is a nucleotide sequence of a Homo sapiens plexin B2;

[0515] SEQ ID NO: 164 is an amino acid sequence of a Homo sapiens plexin B2;

[0516] SEQ ID NO: 165 is a nucleotide sequence of a Homo sapiens ORAI calcium release-activated calcium modulator 1;

[0517] SEQ ID NO: 166 is an amino acid sequence of a Homo sapiens ORAI calcium release-activated calcium modulator 1;

[0518] SEQ ID NO: 167 is a nucleotide sequence of a Homo sapiens Dystroglycan;

[0519] SEQ ID NO: 168 is an amino acid sequence of a Homo sapiens Dystroglycan;

[0520] SEQ ID NO: 169 is a nucleotide sequence of a Homo sapiens Transmembrane protein C14orf176;

[0521] SEQ ID NO: 170 is an amino acid sequence of a Homo sapiens Transmembrane protein C14orf176;

[0522] SEQ ID NO: 171 is a nucleotide sequence of a Homo sapiens Myelin protein zero-like protein 1;

[0523] SEQ ID NO: 172 is an amino acid sequence of a Homo sapiens Myelin protein zero-like protein 1;

[0524] SEQ ID NO: 173 is a nucleotide sequence of a Homo sapiens Claudin-17;

[0525] SEQ ID NO: 174 is an amino acid sequence of a Homo sapiens Claudin-17;

[0526] SEQ ID NO: 175 is a nucleotide sequence of a Homo sapiens Probable G-protein coupled receptor 125;

[0527] SEQ ID NO: 176 is an amino acid sequence of a Homo sapiens Probable G-protein coupled receptor 125;

[0528] SEQ ID NO: 177 is a nucleotide sequence of a Homo sapiens Nicastrin;

[0529] SEQ ID NO: 178 is an amino acid sequence of a Homo sapiens Nicastrin;

[0530] SEQ ID NO: 179 is a nucleotide sequence of a Homo sapiens Uroplakin-1a;

[0531] SEQ ID NO: 180 is an amino acid sequence of a Homo sapiens Uroplakin-1a;

[0532] SEQ ID NO: 181 is a nucleotide sequence of a Homo sapiens Teneurin-3;

[0533] SEQ ID NO: 182 is an amino acid sequence of a Homo sapiens Teneurin-3;

[0534] SEQ ID NO: 183 is a nucleotide sequence of a Homo sapiens Netrin receptor DCC;

[0535] SEQ ID NO: 184 is an amino acid sequence of a Homo sapiens Netrin receptor DCC;

[0536] SEQ ID NO: 185 is a nucleotide sequence of a Homo sapiens Uncharacterized protein KIAA0090;

[0537] SEQ ID NO: 186 is an amino acid sequence of a Homo sapiens Uncharacterized protein KIAA0090;

[0538] SEQ ID NO: 187 is a nucleotide sequence of a Homo sapiens Amiloride-sensitive cation channel 4;

[0539] SEQ ID NO: 188 is an amino acid sequence of a Homo sapiens Amiloride-sensitive cation channel 4;

[0540] SEQ ID NO: 189 is a nucleotide sequence of a Homo sapiens Voltage-dependent L-type calcium channel subunit alpha-1D;

[0541] SEQ ID NO: 190 is an amino acid sequence of a Homo sapiens Voltage-dependent L-type calcium channel subunit alpha-1D;

[0542] SEQ ID NO: 191 is a nucleotide sequence of a Homo sapiens Chondroitin sulfate proteoglycan 4;

[0543] SEQ ID NO: 192 is an amino acid sequence of a Homo sapiens Chondroitin sulfate proteoglycan 4;

[0544] SEQ ID NO: 193 is a nucleotide sequence of a Homo sapiens Dipeptidyl aminopeptidase-like protein 6;

[0545] SEQ ID NO: 194 is an amino acid sequence of a Homo sapiens Dipeptidyl aminopeptidase-like protein 6;

[0546] SEQ ID NO: 195 is a nucleotide sequence of a Homo sapiens Protocadherin Fat 2;

[0547] SEQ ID NO: 196 is an amino acid sequence of a Homo sapiens Protocadherin Fat 2;

[0548] SEQ ID NO: 197 is a nucleotide sequence of a Homo sapiens Low-density lipoprotein receptor-related protein 12;

[0549] SEQ ID NO: 198 is an amino acid sequence of a Homo sapiens Low-density lipoprotein receptor-related protein 12;

[0550] SEQ ID NO: 199 is a nucleotide sequence of a Homo sapiens Neuropeptide Y receptor type 2;

[0551] SEQ ID NO: 200 is an amino acid sequence of a Homo sapiens Neuropeptide Y receptor type 2;

[0552] SEQ ID NO: 201 is a nucleotide sequence of a Homo sapiens Olfactory receptor 11H4;

[0553] SEQ ID NO: 202 is an amino acid sequence of a Homo sapiens Olfactory receptor 11H4;

[0554] SEQ ID NO: 203 is a nucleotide sequence of a Homo sapiens Protocadherin alpha-4;

[0555] SEQ ID NO: 204 is an amino acid sequence of a Homo sapiens Protocadherin alpha-4;

[0556] SEQ ID NO: 205 is a nucleotide sequence of a Homo sapiens Protocadherin alpha-Cl;

[0557] SEQ ID NO: 206 is an amino acid sequence of a Homo sapiens Protocadherin alpha-Cl;

[0558] SEQ ID NO: 207 is a nucleotide sequence of a Homo sapiens Rhomboid domain-containing protein 2;

[0559] SEQ ID NO: 208 is an amino acid sequence of a Homo sapiens Rhomboid domain-containing protein 2;

[0560] SEQ ID NO: 209 is a nucleotide sequence of a Homo sapiens Sodium channel protein type 5 subunit alpha;

[0561] SEQ ID NO: 210 is an amino acid sequence of a Homo sapiens Sodium channel protein type 5 subunit alpha;

[0562] SEQ ID NO: 211 is a nucleotide sequence of a Homo sapiens Serine incorporator 5;

[0563] SEQ ID NO: 212 is an amino acid sequence of a Homo sapiens Serine incorporator 5;

[0564] SEQ ID NO: 213 is a nucleotide sequence of a Homo sapiens Solute carrier family 12 member 1;

[0565] SEQ ID NO: 214 is an amino acid sequence of a Homo sapiens Solute carrier family 12 member 1;

[0566] SEQ ID NO: 215 is a nucleotide sequence of a Homo sapiens Proton-coupled folate transporter;

[0567] SEQ ID NO: 216 is an amino acid sequence of a Homo sapiens Proton-coupled folate transporter;

[0568] SEQ ID NO: 217 is a nucleotide sequence of a Homo sapiens Solute carrier organic anion transporter family member 1B1;

[0569] SEQ ID NO: 218 is an amino acid sequence of a Homo sapiens Solute carrier organic anion transporter family member 1B1;

[0570] SEQ ID NO: 219 is a nucleotide sequence of a Homo sapiens Anoctamin-2;

[0571] SEQ ID NO: 220 is an amino acid sequence of a Homo sapiens Anoctamin-2;

[0572] SEQ ID NO: 221 is a nucleotide sequence of a Homo sapiens ATP-binding cassette sub-family A member 12;

[0573] SEQ ID NO: 222 is an amino acid sequence of a Homo sapiens ATP-binding cassette sub-family A member 12;

[0574] SEQ ID NO: 223 is a nucleotide sequence of a Homo sapiens Carboxypeptidase M;

[0575] SEQ ID NO: 224 is an amino acid sequence of a Homo sapiens Carboxypeptidase M;

[0576] SEQ ID NO: 225 is a nucleotide sequence of a Homo sapiens Neutral amino acid transporter B(0);

[0577] SEQ ID NO: 226 is an amino acid sequence of a Homo sapiens Neutral amino acid transporter B(0);

[0578] SEQ ID NO: 227 is a nucleotide sequence of a Homo sapiens Polycystic kidney disease 2-like 1 protein;

[0579] SEQ ID NO: 228 is an amino acid sequence of a Homo sapiens Polycystic kidney disease 2-like 1 protein;

[0580] SEQ ID NO: 229 is a nucleotide sequence of a Homo sapiens Probable phospholipid-transporting ATPase VA;

[0581] SEQ ID NO: 230 is an amino acid sequence of a Homo sapiens Probable phospholipid-transporting ATPase VA;

[0582] SEQ ID NO: 231 is a nucleotide sequence of a Homo sapiens Acetylcholine receptor subunit gamma;

[0583] SEQ ID NO: 232 is an amino acid sequence of a Homo sapiens Acetylcholine receptor subunit gamma;

[0584] SEQ ID NO: 233 is a nucleotide sequence of a Homo sapiens Insulin receptor-related protein;

[0585] SEQ ID NO: 234 is an amino acid sequence of a Homo sapiens Insulin receptor-related protein;

[0586] SEQ ID NO: 235 is a nucleotide sequence of a Homo sapiens Voltage-dependent N-type calcium channel subunit alpha-1B;

[0587] SEQ ID NO: 236 is an amino acid sequence of a Homo sapiens Voltage-dependent N-type calcium channel subunit alpha-1B;

[0588] SEQ ID NO: 237 is a nucleotide sequence of a Homo sapiens sperm associated antigen IIB;

[0589] SEQ ID NO: 238 is an amino acid sequence of a Homo sapiens sperm associated antigen II;

[0590] SEQ ID NO: 239 is a nucleotide sequence of a Homo sapiens Fraser Syndrome 1;

[0591] SEQ ID NO: 240 is an amino acid sequence of a Homo sapiens Fraser Syndrome 1;

[0592] SEQ ID NO: 241 is a nucleotide sequence of a Homo sapiens immunoglobulin-like domain containing receptor 1;

[0593] SEQ ID NO: 242 is an amino acid sequence of a Homo sapiens immunoglobulin-like domain containing receptor 1;

[0594] SEQ ID NO: 243 is a nucleotide sequence of a Homo sapiens EPB41L1-erythrocyte membrane protein band 4.1 like 1;

[0595] SEQ ID NO: 244 is an amino acid sequence of a Homo sapiens EPB41L1-erythrocyte membrane protein band 4.1 like 1;

[0596] SEQ ID NO: 245 is a nucleotide sequence of a Homo sapiens B melanoma antigen;

[0597] SEQ ID NO: 246 is an amino acid sequence of a Homo sapiens B melanoma antigen;

[0598] SEQ ID NO: 247 is a nucleotide sequence of a Homo sapiens glutamate receptor, ionotropic, AMPA2;

[0599] SEQ ID NO: 248 is an amino acid sequence of a Homo sapiens glutamate receptor, ionotropic, AMPA2;

[0600] SEQ ID NO: 249 is a nucleotide sequence of a Homo sapiens synaptotagmin XV;

[0601] SEQ ID NO: 250 is an amino acid sequence of a Homo sapiens synaptotagmin XV;

[0602] SEQ ID NO: 251 is a nucleotide sequence of a Homo sapiens NFASC-neurofascin homolog (chicken);

[0603] SEQ ID NO: 252 is an amino acid sequence of a Homo sapiens NFASC-neurofascin homolog (chicken);

[0604] SEQ ID NO: 253 is a nucleotide sequence of a Homo sapiens EST (IMAGE:2110090);

[0605] SEQ ID NO: 254 is an amino acid sequence of a Homo sapiens EST (IMAGE:2110090);

[0606] SEQ ID NO: 255 is a nucleotide sequence of a Homo sapiens solute carrier family 30, member 10;

[0607] SEQ ID NO: 256 is an amino acid sequence of a Homo sapiens solute carrier family 30, member 10;

[0608] SEQ ID NO: 257 is a nucleotide sequence of a Homo sapiens UNC-93 homologue A (C. elegans);

[0609] SEQ ID NO: 258 is an amino acid sequence of a Homo sapiens UNC-93 homologue A (C. elegans);

[0610] SEQ ID NO: 259 is a nucleotide sequence of a Homo sapiens Olfactory receptor, family 1, subfamily C, member 1;

[0611] SEQ ID NO: 260 is an amino acid sequence of a Homo sapiens Olfactory receptor, family 1, subfamily C, member 1;

[0612] SEQ ID NO: 261 is a nucleotide sequence of a Homo sapiens transmembrane and tetratricopeptide repeat containing 4;

[0613] SEQ ID NO: 262 is an amino acid sequence of a Homo sapiens transmembrane and tetratricopeptide repeat containing 4;

[0614] SEQ ID NO: 263 is a nucleotide sequence of a Homo sapiens chloride channel 4;

[0615] SEQ ID NO: 264 is an amino acid sequence of a Homo sapiens chloride channel 4;

[0616] SEQ ID NO: 265 is a nucleotide sequence of a Homo sapiens olfactory receptor, family 12, subfamily D, member 3;

[0617] SEQ ID NO: 266 is an amino acid sequence of a Homo sapiens olfactory receptor, family 12, subfamily D, member 3;

[0618] SEQ ID NO: 267 is a nucleotide sequence of a Homo sapiens Butyrophilin-like protein 8 precursor;

[0619] SEQ ID NO: 268 is an amino acid sequence of a Homo sapiens Butyrophilin-like protein 8 precursor;

[0620] SEQ ID NO: 269 is a nucleotide sequence of a Homo sapiens solute carrier, family 7 member 14;

[0621] SEQ ID NO: 270 is an amino acid sequence of a Homo sapiens solute carrier, family 7 member 14;

[0622] SEQ ID NO: 271 is a nucleotide sequence of a Homo sapiens olfactory receptor, family 7 subfamily D member 4;

[0623] SEQ ID NO: 272 is an amino acid sequence of a Homo sapiens olfactory receptor, family 7 subfamily D member 4;

[0624] SEQ ID NO: 273 is a nucleotide sequence of a Homo sapiens mucin 12, cell surface associated;

[0625] SEQ ID NO: 274 is an amino acid sequence of a Homo sapiens mucin 12, cell surface associated;

[0626] SEQ ID NO: 275 is a nucleotide sequence of a Homo sapiens T-cell receptor gamma chain C region PT-gamma-1/2;

[0627] SEQ ID NO: 276 is an amino acid sequence of a Homo sapiens T-cell receptor gamma chain C region PT-gamma-1/2;

[0628] SEQ ID NO: 277 is a nucleotide sequence of a Homo sapiens DEFb109-Defensin beta 109;

[0629] SEQ ID NO: 278 is an amino acid sequence of a Homo sapiens DEFb109-Defensin beta 109;

[0630] SEQ ID NO: 279 is a nucleotide sequence of a Homo sapiens Kv channel interacting protein 1 (variant 1);

[0631] SEQ ID NO: 280 is an amino acid sequence of a Homo sapiens Kv channel interacting protein 1 (variant 1);

[0632] SEQ ID NO: 281 is a nucleotide sequence of a Homo sapiens solute carrier family 45, member 4;

[0633] SEQ ID NO: 282 is an amino acid sequence of a Homo sapiens solute carrier family 45, member 4;

[0634] SEQ ID NO: 283 is a nucleotide sequence of a Homo sapiens ectonucleotide pyrophosphatase/phosphodiesterase 6;

[0635] SEQ ID NO: 284 is an amino acid sequence of a Homo sapiens ectonucleotide pyrophosphatase/phosphodiesterase 6;

[0636] SEQ ID NO: 285 is a nucleotide sequence of a Homo sapiens protocadherin beta 8;

[0637] SEQ ID NO: 286 is an amino acid sequence of a Homo sapiens protocadherin beta 8;

[0638] SEQ ID NO: 287 is a nucleotide sequence of a Homo sapiens olfactory receptor, family 2, sub family T, member 3;

[0639] SEQ ID NO: 288 is an amino acid sequence of a Homo sapiens olfactory receptor, family 2, sub family T, member 3;

[0640] SEQ ID NO: 289 is a nucleotide sequence of a Homo sapiens olfactory receptor family 5, subfamily M, member 10;

[0641] SEQ ID NO: 290 is an amino acid sequence of a Homo sapiens olfactory receptor family 5, subfamily M, member 10;

[0642] SEQ ID NO: 291 is a nucleotide sequence of a Homo sapiens olfactory receptor family 4, subfamily S, member 1;

[0643] SEQ ID NO: 292 is an amino acid sequence of a Homo sapiens olfactory receptor family 4, subfamily S, member 1;

[0644] SEQ ID NO: 293 is a nucleotide sequence of a Homo sapiens G protein-coupled receptor 83;

[0645] SEQ ID NO: 294 is an amino acid sequence of a Homo sapiens G protein-coupled receptor 83;

[0646] SEQ ID NO: 295 is a nucleotide sequence of a Homo sapiens taste receptor, type 2, member 19;

[0647] SEQ ID NO: 296 is an amino acid sequence of a Homo sapiens taste receptor, type 2, member 19;

[0648] SEQ ID NO: 297 is a nucleotide sequence of a Homo sapiens Kallmann syndrome 1 sequence;

[0649] SEQ ID NO: 298 is an amino acid sequence of a Homo sapiens Kallmann syndrome 1 sequence;

[0650] SEQ ID NO: 299 is a nucleotide sequence of a Homo sapiens solute carrier organic anion transporter family, member 1B3;

[0651] SEQ ID NO: 300 is an amino acid sequence of a Homo sapiens solute carrier organic anion transporter family, member 1B3;

[0652] SEQ ID NO: 301 is a nucleotide sequence of a Homo sapiens Gene and two pseudogenes for 7 transmembrane receptor (rhodopsin family) (olfactory receptor like) proteins and a 60S acidic ribosomal protein P2 (RPLP2) pseudogene;

[0653] SEQ ID NO: 302 is an amino acid sequence of a Homo sapiens Gene and two pseudogenes for 7 transmembrane receptor (rhodopsin family) (olfactory receptor like) proteins and a 60S acidic ribosomal protein P2 (RPLP2) pseudogene;

[0654] SEQ ID NO: 303 is a nucleotide sequence of a Homo sapiens major histocompatability complex, class II, DQ beta 1;

[0655] SEQ ID NO: 304 is an amino acid sequence of a Homo sapiens major histocompatability complex, class II, DQ beta 1;

[0656] SEQ ID NO: 305 is a nucleotide sequence of a Homo sapiens CD166 (ALCAM) activated leukocyte cell adhesion molecule;

[0657] SEQ ID NO: 306 is an amino acid sequence of a Homo sapiens CD166 (ALCAM) activated leukocyte cell adhesion molecule;

[0658] SEQ ID NO: 307 is a nucleotide sequence of a Homo sapiens IL-20Rbeta-Interleukin 20 receptor beta;

[0659] SEQ ID NO: 308 is an amino acid sequence of a Homo sapiens IL-20Rbeta-Interleukin 20 receptor beta;

[0660] SEQ ID NO: 309 is a nucleotide sequence of a Homo sapiens podoplanin-differentiation factor; O-glycosylated;

[0661] SEQ ID NO: 310 is an amino acid sequence of a Homo sapiens podoplanin-differentiation factor; O-glycosylated;

[0662] SEQ ID NO: 311 is a nucleotide sequence of a Homo sapiens cholinergic receptor, muscarinic 3;

[0663] SEQ ID NO: 312 is an amino acid sequence of a Homo sapiens cholinergic receptor, muscarinic 3;

[0664] SEQ ID NO: 313 is a nucleotide sequence of a Homo sapiens intergrin, beta 1 (fibronectin receptor, beta polypeptide, antigen CD29 includes MDF2, MSK12);

[0665] SEQ ID NO: 314 is an amino acid sequence of a Homo sapiens intergrin, beta 1 (fibronectin receptor, beta polypeptide, antigen CD29 includes MDF2, MSK12);

[0666] SEQ ID NO: 315 is a nucleotide sequence of a Homo sapiens sialic acid binding Ig-like lectin 8, CD329;

[0667] SEQ ID NO: 316 is an amino acid sequence of a Homo sapiens sialic acid binding Ig-like lectin 8, CD329;

[0668] SEQ ID NO: 317 is a nucleotide sequence of a Homo sapiens RAS-related protein RAP1A;

[0669] SEQ ID NO: 318 is an amino acid sequence of a Homo sapiens RAS-related protein RAP1A;

[0670] SEQ ID NO: 319 is a nucleotide sequence of a Homo sapiens Plexin A2;

[0671] SEQ ID NO: 320 is an amino acid sequence of a Homo sapiens Plexin A2;

[0672] SEQ ID NO: 321 is a nucleotide sequence of a Homo sapiens CD158b (KIR2DL3) killer cell immunoglobulin-like receptor, 2 domains, ligand 3;

[0673] SEQ ID NO: 322 is an amino acid sequence of a Homo sapiens CD158b (KIR2DL3) killer cell immunoglobulin-like receptor, 2 domains, ligand 3;

[0674] SEQ ID NO: 323 is a nucleotide sequence of a Homo sapiens CD314, killer cell lectin-like receptor, subfamily K, member 1;

[0675] SEQ ID NO: 324 is an amino acid sequence of a Homo sapiens CD314, killer cell lectin-like receptor, subfamily K, member 1;

[0676] SEQ ID NO: 325 is a nucleotide sequence of a Homo sapiens chemokine (C—X3-C) receptor 1, CCRL1;

[0677] SEQ ID NO: 326 is an amino acid sequence of a Homo sapiens chemokine (C—X3-C) receptor 1, CCRL1;

[0678] SEQ ID NO: 327 is a nucleotide sequence of a Homo sapiens G protein-coupled receptor 174; and

[0679] SEQ ID NO: 328 is an amino acid sequence of a Homo sapiens G protein-coupled receptor 174.

[0680] SEQ ID NO: 329 is a nucleotide sequence encoding a Homo sapiens Disintegrin and metalloproteinase domain-containing protein 10 (ADAM10).

[0681] SEQ ID NO: 330 is an amino acid sequence of a Homo sapiens Disintegrin and metalloproteinase domain-containing protein 10 (ADAM10).

[0682] SEQ ID NO: 331 is a nucleotide sequence encoding a Homo sapiens signal-regulatory protein beta 1 (SIRPB1).

[0683] SEQ ID NO: 332 is an amino acid sequence of a Homo sapiens signal-regulatory protein beta 1 (SIRPB1).

[0684] SEQ ID NO: 333 is a nucleotide sequence encoding a Homo sapiens GM-CSF receptor subunit alpha precursor (CSF2RA).

[0685] SEQ ID NO: 334 is an amino acid sequence of a Homo sapiens GM-CSF receptor subunit alpha precursor (CSF2RA).

[0686] SEQ ID NO: 335 is a nucleotide sequence encoding a Homo sapiens Ecotropic viral integration 5 (EVI5).

[0687] SEQ ID NO: 336 is an amino acid sequence of a Homo sapiens Ecotropic viral integration 5 (EVI5).

[0688] SEQ ID NO: 337 is a nucleotide sequence encoding a Homo sapiens lysyl oxidase-like 4 (LOXL4).

[0689] SEQ ID NO: 338 is an amino acid sequence of a Homo sapiens lysyl oxidase-like 4 (LOXL4).

[0690] SEQ ID NO: 339 is a nucleotide sequence encoding a Homo sapiens Leucine rich containing 33 (LRRC33).

[0691] SEQ ID NO: 340 is an amino acid sequence of a Homo sapiens Leucine rich containing 33 (LRRC33).

### DETAILED DESCRIPTION

### Selected Definitions

[0692] As used herein, the term “endothelial progenitor cell” or “EPC” shall be understood to mean a cell of the endothelial lineage capable of differentiating into a mature endothelial cell, for example a blood vessel endothelial cell. This term does not include embryonic stem cells or induced pluripotent cells (which are capable of differentiating into endothelium). Exemplary EPCs are monocytic EPCs or hemangioblastic EPCs. Exemplary EPCs express at least sphingosine kinase 1 (SK-1). Alternatively or in addition, EPCs express at least CD34 or at least CD14. Alternatively, or in addition, the EPCs express at least CD133. EPCs may also express CD45 and/or CD31 and/or VEGFR2. Alternatively, or in addition, an EPC does not express significant or above background levels of CD144 and/or vWF and/or eNOS and/or Tie2. Alternatively or in addition, EPCs produce pro-angiogenic factors, e.g., hepatocyte growth factor and/or insulin-like growth factor-1 and/or basic fibroblast growth factor and/or VEGF. In one example, the EPCs do not adhere to tissue culture plastic-ware, optionally plastic-ware coated with extracellular matrix or a component thereof (e.g., fibronectin).). Therefore, the EPCs used in the present disclosure are, for example, non-adherent EPCs. In one example, the EPCs are isolated from 4-7 day cultured non-adherent CD133 expressing mononuclear cells or are contained within a population of 4-7 day cultured non-adherent CD133 expressing mononuclear cells.

[0693] The term “endothelium” or “endothelial cell” shall be understood to mean a tissue or cell that lines tissues of the circulatory system. Endothelium is a form of epithelium, in particular, squamous epithelium.

[0694] The term “EPC-associated condition” shall be taken to encompass any disease or disorder or state in which modulation of EPC numbers and/or activity may provide a beneficial effect and/or characterized by excessive or insufficient EPC numbers and/or activity. Exemplary conditions are described herein and are to be taken to apply mutatis mutandis to those examples of the disclosure relating to diagnosis/prognosis/treatment/prophylaxis of an EPC-associated condition. In one example, an EPC-associated condition is characterized by insufficient EPC numbers and/or activity. Exemplary conditions include cardiovascular disease, autoimmune conditions (e.g., rheumatoid arthritis, psoriatic arthritis, systemic lupus erythematosus (SLE) and systemic sclerosis), antineutrophil cytoplasmic antibodies (ANCA)-associated vasculitis, ischemia (including ischemia resulting from a transplant) and testicular necrosis. In another example, the condition is associated with excessive EPC numbers and/or activity (including excessive neovascularization). Exemplary conditions include cancer (including solid tumors, leukemias, lymphoma, melanoma, glioma, breast cancer, colonic cancer, gastric cancer, esophageal cancer, renal cell cancer, ovarian cancer, cervical cancer, carcinoid cancer, testicular cancer, prostate cancer, head and neck cancer and hepatocellular carcinoma), cancer metastasis, cancer neovascularization, autoimmune disease (including psoriasis), nephropathy, retinopathy, preeclampsia hepatitis, sepsis and macular degeneration.

[0695] As used herein, the term “EPC activity” will be understood to encompass any function that is characteristic of an EPC and includes any one or more of the following:
[0696] Uptake of diacetylated LDL (Dil-Ac-LDL);
[0697] Binding of Ulex europaeus I lectin;
[0698] Labeling with antibodies that bind to CD34, CD133 and VEGF-R2;
[0699] Ability to form tubes in vitro;
[0700] Migration towards angiogenic factors (such as VEGF) in vitro or in vivo;
[0701] Secretion of angiogenic factors (such as VEGF, hepatocyte growth factor, granulocyte-colony stimulating factor, Macrophage migration inhibitory factor interleukin 8);
[0702] Ability to induce neovascularization in vivo; and
[0703] Ability to form colony forming units (CFUs).

[0704] Assays for determining EPC activity are known in the art and/or described in more detail herein.

[0705] Based on the foregoing, the skilled artisan will be aware that a compound or method that inhibits the activity of an EPC can inhibit any activity discussed above. Such inhibition can be by way of modulating a biological activity in an EPC to thereby inhibit the activity or by killing (including lysing) an EPC.

[0706] As used herein, the term “endothelial cell other than an EPC” or “non-EPC” includes mature endothelial cells, such as cells expressing CD144 and/or vWF and/or eNOS and/or Tie2.

[0707] Reference herein to a “fold change” in expression or “X fold greater expression” shall be understood to mean the ratio of the level of expression of one cell type compared to another cell type. Fold change in expression is calculated using standard methods in the art. For example, to determine the fold increase in expression of a nucleic acid or protein in an EPC compared to a HUVEC, the level of expression in an EPC is determined and the level of expression in a HUVEC is determined and the ratio between those values is calculated. Numerous methods for determining expression levels of nucleic acids and/or proteins are known in the art. Non-limiting examples of such methods are described herein and are to be taken to apply mutatis mutandis to the determination of fold change in expression of a protein or nucleic acid.

[0708] As used herein, the term “enriched” or “enrich” in the context of a cell population shall be taken to encompass a population of cells comprising EPCs, including a population in which the number or percentage of EPCs is greater than the number or percentage in a naturally occurring cell population. For example, a population enriched in EPCs is made up of at least about 0.02% of said cells, or at least about 0.05% of said cells or at least about 0.1% of said cells or at least about 0.2% of said cells or at least about 0.5% of said cells or at least about 0.5% of said cells or at least about 0.8% of said cells or at least about 1% of said cells or at least about 2% of said cells or at least about 3% of said cells or at least about 4% of said cells or at least about 5% of said cells or at least about 10% of said cells or at least about 15% of said cells or at least about 20% of said cells or at least about 25% of said cells or at least about 30% of said cells or at least about 40% of said cells or at least about 50% of said cells or at least about 60% of said cells or at least about 70% of said cells or at least about 80% of said cells or at least about 85% of said cells or at least about 90% of said cells or at least about 95% of said cells or at least about 97% of said cells or at least about 98% of said cells or at least about 99% of said cells.

[0709] As used herein, the terms “preventing”, “prevent” or “prevention” include administering a therapeutically effective amount of an inhibitor(s) and/or agent(s) described herein sufficient to stop or hinder the development of at least one symptom of a specified disease or condition.

[0710] The term “sample” shall be understood to mean a tissue or fluid from a subject, e.g., a blood sample (including blood for a subject treated to mobilize bone marrow stem cells or that from umbilical cord) or fraction thereof (e.g., an umbilical cord fraction, plasma or serum or buffy coat fraction or peripheral blood mononuclear cell fraction) or bone marrow or a part thereof. Accordingly, the present disclosure also encompasses a method additionally comprising providing or obtaining a sample from a subject. Such a sample may have been isolated previously from a subject, e.g., the method is performed in vitro or ex vivo.

[0711] As used herein, the term “specifically binds” shall be taken to mean a compound reacts or associates more frequently, more rapidly, with greater duration and/or with greater affinity with a particular cell or substance than it does with alternative cells or substances. For example, a compound that specifically binds to a target protein is a compound that binds that protein or an epitope or immunogenic fragment thereof with greater affinity, avidity, more readily, and/or with greater duration than it binds to unrelated protein and/or epitopes or immunogenic fragments thereof. It is also understood by reading this definition that, for example, a compound that specifically binds to a first target may or may not specifically bind to a second target. As such, “specific binding” does not necessarily require exclusive binding or non-detectable binding of another molecule, this is encompassed by the term “selective binding”. Generally, but not necessarily, reference to binding means specific binding.

[0712] As used herein, the term “subject” shall be taken to mean any subject comprising EPCs, for example a mammal. Exemplary subjects include but are not limited to human, primate, livestock (e.g. sheep, cow, horse, donkey, pig), companion animals (e.g. dogs, cats), laboratory test animals (e.g. mice, rabbits, rats, guinea pigs, hamsters), captive wild animal (e.g. fox, deer). For example, the mammal is a human or primate. In one example, the mammal is a human.

[0713] As used herein, the terms “treating”, “treat” or “treatment” include administering a therapeutically effective amount of a compound described herein sufficient to reduce or eliminate at least one symptom of a specified disease or condition.

### General

[0714] The term “and/or”, e.g., “X and/or Y” shall be understood to mean either “X and Y” or “X or Y” and shall be taken to provide explicit support for both meanings or for either meaning.

[0715] Throughout this specification the word “comprise”, or variations such as “comprises” or “comprising”, will be understood to imply the inclusion of a stated element, integer or step, or group of elements, integers or steps, but not the exclusion of any other element, integer or step, or group of elements, integers or steps.

[0716] Throughout this specification, unless specifically stated otherwise or the context requires otherwise, reference to a single step, composition of matter, group of steps or group of compositions of matter shall be taken to encompass one and a plurality (i.e. one or more) of those steps, compositions of matter, groups of steps or group of compositions of matter.

[0717] Those skilled in the art will appreciate that the disclosure described herein is susceptible to variations and modifications other than those specifically described. It is to be understood that the disclosure includes all such variations and modifications. The disclosure also includes all of the steps, features, compositions and compounds referred to or indicated in this specification, individually or collectively, and any and all combinations or any two or more of said steps or features.

[0718] The present disclosure is not to be limited in scope by the specific examples described herein, which are intended for the purpose of exemplification only. Functionally-equivalent products, compositions and methods are clearly within the scope of the disclosure, as described herein.

[0719] Any example of the disclosure herein shall be taken to apply mutatis mutandis to any other example of the disclosure unless specifically stated otherwise.

[0720] Unless specifically defined otherwise, all technical and scientific terms used herein shall be taken to have the same meaning as commonly understood by one of ordinary skill in the art (for example, in cell culture, molecular genetics, immunology, immunohistochemistry, protein chemistry, and biochemistry).

[0721] Unless otherwise indicated, the recombinant protein, cell culture, and immunological techniques utilized in the present disclosure are standard procedures, well known to those skilled in the art. Such techniques are described and explained throughout the literature in sources such as, J. Perbal, A Practical Guide to Molecular Cloning, John Wiley and Sons (1984), J. Sambrook et al., Molecular Cloning: A Laboratory Manual, Cold Spring Harbor Laboratory Press (1989), T. A. Brown (editor), Essential Molecular Biology: A Practical Approach, Volumes 1 and 2, IRL Press (1991), D. M. Glover and B. D. Hames (editors), DNA Cloning: A Practical Approach, Volumes 1-4, IRL Press (1995 and 1996), and F. M. Ausubel et al., (editors), Current Protocols in Molecular Biology, Greene Pub. Associates and Wiley-Interscience (1988, including all updates until present), Ed Harlow and David Lane (editors) Antibodies: A Laboratory Manual, Cold Spring Harbor Laboratory, (1988), and J. E. Coligan et al., (editors) Current Protocols in Immunology, John Wiley & Sons (including all updates until present).

### EPC Markers and Encoding Nucleic Acids

[0722] Exemplary EPC protein markers and nucleic acids encoding same are discussed herein and/or set forth in any one or more of Tables 1 to 6. In this respect, the present disclosure encompasses nucleic acids or proteins having a sequence at least about 70% identical to a nucleic acid or protein recited in any one or more of Tables 1 to 6. The EPC protein markers may be a cell surface protein located on the plasma membrane, or a protein secreted into extracellular space and/or located in the cytoplasm of an EPC cell.

TABLE 1
Proteins and nucleic acids encoding same that are upregulated in, on or secreted from EPCs.

| | | | | Exemplary | Exemplary |
|---|---|---|---|---|---|
| | | Reference | | Nucleotide | Amino Acid |
| Gene ID | Entrez Gene Name | Sequence(s) | Category | SEQ ID NO | SEQ ID NO |
| DSG2 | desmoglein 2 | NM_001943 | cell adhesion | 15 | 16 |
| EMB | embigin homolog | NM_198449; | cell adhesion | 1 | 2 |
| | | NR_003955 | | | |
| EMR2 | egf-like module containing, | NM_013447; | receptor | 17 | 18 |
| | mucin-like, hormone | NM_152916; | | | |
| | receptor-like 2 | NM_152919; | | | |
| | | NM_152917; | | | |
| | | NM_152920; | | | |
| | | NM_152921; | | | |
| | | NM_152918 | | | |
| LOXL4 | lysyl oxidase-like 4 | NM_032211 | enzyme | 337 | 338 |
| NKG7 | natural killer cell group 7 | NM_005601 | other | 9 | 10 |
| | sequence | | | | |
| ADCY7 | adenylate cyclase 7 | NM_001114 | enzyme | 13 | 14 |
| SLC39A8 | solute carrier family 39 | NM_022154; | transport | 3 | 4 |
| | (zinc transporter), member 8 | NM_001135148; | | | |
| | | NM_001135147; | | | |
| | | NM_001135146 | | | |
| TM7SF3 | transmembrane 7 | NM_016551 | other | 5 | 6 |
| | superfamily member 3 | | | | |
| NCSTN | Nicastrin | Q92542; Q5T207; | enzyme | 177 | 178 |
| | | Q86VV5 | | | |
| SIRPB1 | signal-regulatory protein | NM_006065 | receptor | 331 | 332 |
| | beta 1 | | | | |
| INSRR | insulin receptor-related | P14616; O60724; | enzyme | 233 | 234 |
| | protein | Q5VZS3 | | | |
| PKD2L1 | polycystic kidney disease 2- | Q9P0L9; O75972; | transport | 227 | 228 |
| | like 1 protein | Q5W039; Q9UP35; | | | |
| | | Q9UPA2 | | | |
| DPP6 | dipeptidyl aminopeptidase- | P42658 | enzyme | 193 | 194 |
| | like protein 6 | | | | |
| LRRC33 | Leucine rich containing 33 | NM_198565 | other | 339 | 340 |
| | | Q86YC3 | | | |
| SLC1A5 | Neutral amino acid | Q15758; A8K9H5; | transport | 225 | 226 |
| | transporter B(0) | D0EYG6; O95720; | | | |
| | | Q96RL9; Q9BWQ3; | | | |
| | | Q9UNP2 | | | |
| ADAM10 | Disintegrin and | NM_001110 | enzyme | 329 | 330 |
| | metalloproteinase domain- | | | | |
| | containing protein 10 | | | | |
| CSF2RA | GM-CSF receptor subunit | NM_006140 | receptor | 333 | 334 |
| | alpha precursor | NM_172245 | | | |
| | | NM_172246 | | | |
| | | NM_172247 | | | |
| | | NM_172249 | | | |
| | | NM_001161529 | | | |
| | | NM_001161530 | | | |
| | | NM_001161531 | | | |
| | | NR_027760 | | | |
| | | NM_001161532 | | | |
| EVI5 | Ecotropic viral integration 5 | NM_005665 | other | 335 | 336 |
| | | Q59FE7 | | | |
| EVI2B | ecotropic viral integration | NM_001003927 | other | 57 | 58 |
| | site 2B | | | | |
| SORL1(LRP9) | sortilin-related receptor, | NM_003105 | transport | 45 | 46 |
| | L(DLR class) A repeats- | | | | |
| | containing | | | | |
| CNR2 | cannabinoid receptor 2 | NM_001841 | receptor | 33 | 34 |
| | (macrophage) | | | | |
| NCKAP1L | NCK-associated protein | NM_005337; | other | 55 | 56 |
| | 1-like | NM_001184976 | | | |
| SIGLEC10 | sialic acid binding Ig-like | NM_033130; | cell adhesion | 23 | 24 |
| | lectin 10 | NM_001171156; | | | |
| | | NM_001171157; | | | |
| | | NM_001171158; | | | |
| | | NM_001171159; | | | |
| | | NM_001171160; | | | |
| | | NM_001171161 | | | |
| SIGLEC6 | sialic acid binding Ig-like | NM_001245; | cell adhesion | 25 | 26 |
| | lectin 6 | NM_198845; | | | |
| | | NM_198846; | | | |
| | | NM_001177547; | | | |
| | | NM_001177548; | | | |
| | | NM_001177549 | | | |
| SLC15A2 | solute carrier family 15 | NM_021082; | transport | 19 | 20 |
| | (H+/peptide transporter), | NM_001145998 | | | |
| | member 2 | | | | |
| SLC22A16 | solute carrier family 22 | NM_033125 | transport | 49 | 50 |
| | (organic cation/carnitine | | | | |
| | transporter), member 16 | | | | |
| SLC24A3 | solute carrier family 24 | NM_020689 | transport | 51 | 52 |
| | (sodium/potassium/calcium | | | | |
| | exchanger), member 3 | | | | |
| SLC2A5 | solute carrier family 2 | NM_003039; | transport | 53 | 54 |
| | (facilitated glucose/fructose | NM_001135585 | | | |
| | transporter), member 5 | | | | |
| SLC1A3 | solute carrier family 1 (glial | NM_004172; | transport | 103 | 104 |
| | high affinity glutamate | NM_001166695; | | | |
| | transporter), member 3 | NM_001166696 | | | |
| PLXNC1 | plexin C1 | NM_005761 | cell adhesion | 7 | 8 |
| OR52B6 | olfactory receptor, family | NM_001005162 | receptor | 11 | 12 |
| | 52, subfamily B, member 6 | | | | |
| ABCC4 | ATP-binding cassette, sub- | NM_005845\| | transport | 43 | 44 |
| | family C (CFTR/MRP), | NM_001105515 | | | |
| | member 4 | | | | |
| SLC16A6 | solute carrier family 16, | NM_004694; | transport | 21 | 22 |
| | member 6 (monocarboxylic | NM_001174166 | | | |
| | acid transporter 7) | | | | |
| AREG | amphiregulin | NM_001657 | growth factor | 27 | 28 |
| ITM2A | integral membrane protein 2A | NM_004867 | other | 29 | 30 |
| GPM6B | glycoprotein M6B | NM_001001995; | other | 31 | 32 |
| | | NM_001001996; | | | |
| | | NM_005278; | | | |
| | | NM_001001994 | | | |
| PRSS21 | protease, serine, 21 | NM_006799; | enzyme | 35 | 36 |
| | (testisin) | NM_144956; | | | |
| | | NM_144957 | | | |
| NRG4 | neuregulin 4 | NM_138573 | growth factor | 37 | 38 |
| EPGN | epithelial mitogen homolog | NM_001013442 | growth factor | 39 | 40 |
| | (mouse) | | | | |
| RHBDD1 | rhomboid domain | NM_032276; | enzyme | 41 | 42 |
| | containing 1 | NM_001167608 | | | |
| SLC8A1 | solute carrier family 8 | NM_021097; | transport | 47 | 48 |
| | (sodium/calcium exchanger), | NM_001112800; | | | |
| | member 1 | NM_001112801; | | | |
| | | NM_001112802 | | | |
| KCNQ5 | potassium voltage-gated | NM_019842; | transport | 59 | 60 |
| | channel | NM_001160130; | | | |
| | | NM_001160132; | | | |
| | | NM_001160133; | | | |
| | | NM_001160134 | | | |
| P2RY14 | purinergic receptor P2Y, G- | NM_014879; | receptor | 61 | 62 |
| | protein coupled, 14 | Q15391; | | | |
| | | BC034989; | | | |
| | | Q15391; | | | |
| | | NM_001081455 | | | |
| HTR1F | 5-hydroxytryptamine | NM_000866; | receptor | 63 | 64 |
| | (serotonin) receptor 1F | Q4QRI9; | | | |
| | | BC069125; | | | |
| | | P30939; | | | |
| | | BC069125; | | | |
| | | Q4QRI9 | | | |
| TRAT1 | T cell receptor associated | NM_016388; | other | 65 | 66 |
| | transmembrane adaptor 1 | Q6PIZ9; | | | |
| | | BC025713; | | | |
| | | Q6PIZ9 | | | |
| GPR183 | G protein-coupled receptor | NM_004951 | receptor | 67 | 68 |
| | 183 | | | | |
| OR13D1 | olfactory receptor, family | NM_001004484 | receptor | 69 | 70 |
| | 13, subfamily D, member 1 | | | | |
| VSIG4 | V-set and immunoglobulin | NM_007268; | other | 71 | 72 |
| | domain containing 4 | NM_001100431; | | | |
| | | NM_001184830, | | | |
| | | NM_001184831 | | | |
| TAS2R4 | taste receptor, type 2, | NM_016944 | receptor | 73 | 74 |
| | member 4 | | | | |
| GPR18 | G protein-coupled receptor | NM_005292; | receptor | 75 | 76 |
| | 18 | NM_001098200 | | | |
| TAS2R3 | taste receptor, type 2, | NM_016943 | receptor | 77 | 78 |
| | member 3 | | | | |
| MR1 | major histocompatibility | NM_001531; | receptor | 79 | 80 |
| | complex, class I-related | Q95460; U22963; | | | |
| | | Q53GM1; | | | |
| | | NM_001531; | | | |
| | | Q53GM1; U22963; | | | |
| | | Q95460; | | | |
| | | NM_001194999, | | | |
| | | NM_001195000, | | | |
| | | NM_001195035 | | | |
| GPR34 | G protein-coupled receptor | NM_001097579 | receptor | 81 | 82 |
| | 34 | NM_005300 | | | |
| KCNAB2 | potassium voltage-gated | NM_003636 | transport | 83 | 84 |
| | channel, shaker-related | NM_172130 | | | |
| | subfamily, beta member 2 | | | | |
| KCNE3 | potassium voltage-gated | NM_005472 | transport | 85 | 86 |
| | channel, Isk-related family, | | | | |
| | member 3 | | | | |
| LAT2 | linker for activation of T | NM_032464 | other | 87 | 88 |
| | cells family, member 2 | NM_032463 | | | |
| | | NM_014146 | | | |
| MLC1 | megalencephalic | NM_015166 | transport | 89 | 90 |
| | leukoencephalopathy with | NM_139202 | | | |
| | subcortical cysts 1 | | | | |
| ENPP5 | ectonucleotide | NM_021572 | enzyme | 91 | 92 |
| | pyrophosphatase/phosphodi- | | | | |
| | esterase 5 (putative function) | | | | |
| FLVCR1 | feline leukemia virus | NM_014053 | transport | 93 | 94 |
| | subgroup C cellular receptor | | | | |
| | 1 | | | | |
| GPR65 | G protein-coupled receptor | NM_003608 | receptor | 95 | 96 |
| | 65 | | | | |
| OPN3 | opsin 3 | NM_014322; | receptor | 97 | 98 |
| | | NM_001821 | | | |
| TAS2R13 | taste receptor, type 2, | NM_023920 | receptor | 99 | 100 |
| | member 13 | | | | |
| CLDN20 | claudin 20 | NM_001001346 | cell adhesion | 101 | 102 |
| SLC1A4 | solute carrier family 1 | NM_003038; | transport | 105 | 106 |
| | (glutamate/neutral amino | NM_001193493 | | | |
| | acid transporter), member 4 | | | | |
| CLDN10 | claudin 10 | NM_182848; | cell adhesion | 107 | 108 |
| | | NM_006984 | | | |
| ADAMTS2 | ADAM metallopeptidase | NM_014244; | enzyme | 109 | 110 |
| | with thrombospondin type 1 | NM_021599 | | | |
| | motif, 2 | | | | |
| TBXAS1 | thromboxane A synthase 1 | NM_001061; | enzyme | 111 | 112 |
| | (platelet) | NM_030984; | | | |
| | | NM_001130966, | | | |
| | | NM_001166253, | | | |
| | | NM_001166254 | | | |
| LAPTM5 | lysosomal protein | NM_006762 | transport | 113 | 114 |
| | transmembrane 5 | | | | |
| VAMP8 | vesicle-associated | NM_003761 | transport | 115 | 116 |
| | membrane protein 8 | | | | |
| | (endobrevin) | | | | |
| AKAP7 | A kinase (PRKA) anchor | NM_016377; | transport | 117 | 118 |
| | protein 7 | NM_138633; | | | |
| | | NM_004842 | | | |
| SEMA3C | sema domain, | NM_006379 | receptor | 119 | 120 |
| | immunoglobulin domain | | | | |
| | (Ig), short basic domain, | | | | |
| | secreted, (semaphorin) 3C | | | | |
| SLC38A1 | solute carrier family 38, | NM_001077484; | transport | 121 | 122 |
| | member 1 | Q9H2H9; | | | |
| | | NM_030674; | | | |
| | | Q9H2H9 | | | |
| CD302 | CD302 molecule | NM_014880 | receptor | 123 | 124 |
| PLBD1 | phospholipase B domain | NM_024829 | enzyme | 125 | 126 |
| | containing 1 | | | | |
| LOXL3 | lysyl oxidase-like 3 | NM_032603 | enzyme | 127 | 128 |
| FAM46C | family with sequence | NM_017709 | other | 129 | 130 |
| (includes | similarity 46, member C | | | | |
| EG: 54855) | | | | | |
| MFAP4 | microfibrillar-associated | NM_002404 | cell adhesion | 131 | 132 |
| | protein 4 | | | | |
| IQCB1 | IQ motif containing B1 | NM_001023570; | other | 133 | 134 |
| | | NM_001023571 | | | |
| FBN2 | fibrillin 2 | NM_001999 | structural | 135 | 136 |
| (includes | | | | | |
| EG: 2201) | | | | | |
| OGN | osteoglycin | NM_033014; | growth factor | 137 | 138 |
| | | NM_014057 | | | |
| OMD | osteomodulin | NM_005014 | cell adhesion | 139 | 140 |
| ASPN | asporin | NM_017680; | other | 141 | 142 |
| | | NM_001193335 | | | |
| PZP | pregnancy-zone protein | NM_002864 | other | 143 | 144 |
| HSN2 | hereditary sensory | NM_213655; | enzyme | 145 | 146 |
| | neuropathy, type II (WNK1) | NM_014823; | | | |
| | | NM_018979; | | | |
| | | NM_001184985 | | | |
| SERPINI2 | serpin peptidase inhibitor, | NM_006217 | other | 147 | 148 |
| | clade I (pancpin), member 2 | | | | |
| ECM2 | extracellular matrix protein | NM_001393 | cell adhesion | 149 | 150 |
| | 2, female organ and | | | | |
| | adipocyte specific | | | | |
| ERLIN1 | ER lipid raft associated 1 | NM_006459; | other | 151 | 152 |
| | | NM_001100626 | | | |
| CELR2_HUMAN | cadherin, EGF LAG seven- | Q9HCU4; Q5T2Y7; | receptor | 153 | 154 |
| | pass G-type receptor 2 | Q92566 | | | |
| | (flamingo homolog, | | | | |
| | Drosophila) | | | | |
| NPTN_HUMAN | neuroplastin | Q9Y639; B7Z4D3; | cell adhesion | 155 | 156 |
| | | B7ZLL2; Q17R52; | | | |
| | | Q59EJ9; Q6NVX7; | | | |
| | | Q9Y640 | | | |
| APMAP_HUMAN | chromosome 20 open | Q9HDC9; A8K514; | enzyme | 157 | 158 |
| | reading frame 3 | B4DXG1; Q6UVZ8; | | | |
| | | Q9GZS8; Q9NUB2 | | | |
| GBRA3_HUMAN | gamma-aminobutyric acid | P34903; Q8TAF9 | transport | 159 | 160 |
| | (GABA) A receptor, alpha 3 | | | | |
| DSG3_HUMAN | desmoglein 3 (pemphigus | P32926; A8K2V2 | cell adhesion | 161 | 162 |
| | vulgaris antigen) | | | | |
| PLXB2_HUMAN | plexin B2 | O15031; A6QRH0; | receptor | 163 | 164 |
| | | Q7KZU3; Q9BSU7 | | | |
| CRCM1_HUMAN | ORAI calcium release- | Q96D31; Q3MHV3; | transport | 165 | 166 |
| | activated calcium modulator | Q6DHX2; Q96BP7; | | | |
| | 1 | Q96K71 | | | |
| DAG1 | Dystroglycan | Q14118; A8K6M7; | receptor | 167 | 168 |
| | | Q969J9 | | | |
| C14ORF176 | Transmembrane protein | P0C7T8 | other | 169 | 170 |
| | C14orf176 | | | | |
| MPZL1 | Myelin protein zero-like | O95297; B2REB9; | receptor | 171 | 172 |
| | protein 1 | Q5R332; Q8IX11; | | | |
| | | Q9BWZ3; Q9NYK4; | | | |
| | | Q9UL20 | | | |
| CLDN17 | Claudin-17 | P56750; Q3MJB5; | cell adhesion | 173 | 174 |
| | | Q6UY37 | | | |
| GPR125 | Probable G-protein coupled | Q8IWK6; Q6UXK9; | receptor | 175 | 176 |
| | receptor 125 | Q86SQ5; Q8TC55 | | | |
| UPK1A | Uroplakin-1a | O00322; Q3KNU5; | other | 179 | 180 |
| | | Q3KNU6 | | | |
| ODZ3 | Teneurin-3 | Q9P273; Q5XUL9; | receptor | 181 | 182 |
| | | Q96SY2; Q9NV77; | | | |
| | | Q9NVW1; Q9NZJ2 | | | |
| DCC | Netrin receptor DCC | P43146 | receptor | 183 | 184 |
| KIAA0090 | Uncharacterized protein | Q8N766; A8K6F3; | other | 185 | 186 |
| | KIAA0090 | Q14700; Q5TG62; | | | |
| | | Q63HL0; Q63HL3; | | | |
| | | Q8NBH8 | | | |
| ACCN4 | Amiloride-sensitive cation | Q96FT7; Q53SB7; | transport | 187 | 188 |
| | channel 4 | Q6GMS1; Q6PIN9; | | | |
| | | Q9NQA4 | | | |
| CACNA1D | Voltage-dependent L-type | Q01668; Q13916; | transport | 189 | 190 |
| | calcium channel subunit | Q13931; Q9UDC3 | | | |
| | alpha-1D | | | | |
| CSPG4 | Chondroitin sulfate | Q6UVK1; D3DW77; | other | 191 | 192 |
| | proteoglycan 4 | Q92675 | | | |
| FAT2 | Protocadherin Fat 2 | Q9NYQ8; O75091; | cell adhesion | 195 | 196 |
| | | Q9NSR7 | | | |
| LRP12 | Low-density lipoprotein | Q9Y561; A8K137 | receptor | 197 | 198 |
| | receptor-related protein 12 | | | | |
| NPY2R | Neuropeptide Y receptor | P49146; Q13281; | receptor | 199 | 200 |
| | type 2 | Q13457; Q4W5G7; | | | |
| | | Q6AZZ6; Q9UE67 | | | |
| OR11H4 | Olfactory receptor 11H4 | Q8NGC9; B2RNQ4; | receptor | 201 | 202 |
| | | Q6IF07 | | | |
| PCDHA4 | Protocadherin alpha-4 | Q9UN74; O75285; | cell adhesion | 203 | 204 |
| | | Q2M253 | | | |
| PCDHAC1 | Protocadherin alpha-C1 | Q9H158; Q9Y5F5; | cell adhesion | 205 | 206 |
| | | Q9Y5I5 | | | |
| RHBDD2 | Rhomboid domain- | Q6NTF9; Q7L534; | other | 207 | 208 |
| | containing protein 2 | Q9H5W6; Q9UDT2 | | | |
| SCN5A | Sodium channel protein type | Q14524; ASH1P8; | transport | 209 | 210 |
| | 5 subunit alpha | A6N922; A6N923; | | | |
| | | B2RTU0; Q75RX9; | | | |
| | | Q75RY0; Q86UR3; | | | |
| | | Q8IZC9; Q96J69 | | | |
| SERINC5 | Serine incorporator 5 | Q86VE9; Q495A4; | transport | 211 | 212 |
| | | Q495A6 | | | |
| SLC12A1 | Solute carrier family 12 | Q13621; A8JYA2 | transport | 213 | 214 |
| | member 1 | | | | |
| SLC46A1 | Proton-coupled folate | Q96NT5; Q1HE20; | transport | 215 | 216 |
| | transporter | Q86T92; Q8TEG3; | | | |
| | | Q96FL0 | | | |
| SLCO1B1 | Solute carrier organic anion | Q9Y6L6; B2R7G2; | transport | 217 | 218 |
| | transporter family member | Q9NQ37; Q9UBF3; | | | |
| | 1B1 | Q9UH89 | | | |
| ANO2 | Anoctamin-2 | Q9NQ90; C4N787; | transport | 219 | 220 |
| | | Q9H847 | | | |
| ABCA12 | ATP-binding cassette sub- | Q86UK0; Q53QE2; | transport | 221 | 222 |
| | family A member 12 | Q53S55; Q8IZW6; | | | |
| | | Q96JT3; Q9Y4M5 | | | |
| CPM | Carboxypeptidase M | P14384; B2R800; | enzyme | 223 | 224 |
| | | Q9H2K9 | | | |
| ATP10A | Probable phospholipid- | O60312; Q969I4 | transport | 229 | 230 |
| | transporting ATPase VA | | | | |
| CHRNG | Acetylcholine receptor | P07510; B3KWM8; | receptor | 231 | 232 |
| | subunit gamma | Q53RG2 | | | |
| CACNA1B | Voltage-dependent N-type | Q00975; B1AQK5 | transport | 235 | 236 |
| | calcium channel subunit | | | | |
| | alpha-1B | | | | |
| SPAG11B | sperm associated antigen | NM_016512 | other | 237 | 238 |
| | 11B | | | | |
| FRAS1 | Fraser Syndrome 1 | NM_025074; | other | 239 | 240 |
| | | NM_001166133 | | | |
| ILDR1 | immunoglobulin-like | NM_175924 | receptor | 241 | 242 |
| | domain containing receptor | | | | |
| | 1 | | | | |
| EPB41L1 | EPB41L1—erythrocyte | NM_012156; | structural | 243 | 244 |
| | membrane protein band 4.1 | NM_177996 | | | |
| | like 1 | | | | |
| BAGE | B melanoma antigen | NM_001187 | other | 245 | 246 |
| AMPA2 | glutamate receptor, | NM_000826; | transport | 247 | 248 |
| | ionotropic, AMPA2 | NM_001083619, | | | |
| | | NM_001083620 | | | |
| SYT15 | synaptotagmin XV | NM_031912, | transport | 249 | 250 |
| | | NM_181519 | | | |
| NFASC | NFASC—neurofascin | NM_015090; | cell adhesion | 251 | 252 |
| | homolog (chicken) | NM_001005388, | | | |
| | | NM_001160331, | | | |
| | | NM_001160332, | | | |
| | | NM_001160333, | | | |
| | | NM_001005389 | | | |
| NLGN1 | EST (IMAGE: 2110090) | AI401535 | enzyme | 253 | 254 |
| SLC30A10 | solute carrier family 30, | NM_001004433 | transport | 255 | 256 |
| | member 10 | | | | |
| UNC93A | UNC-93 homologue A | NM_018974; | other | 257 | 258 |
| | (C. elegans) | NM_001143947 | | | |
| OR1C1 | Olfactory receptor, family 1, | NM_012353 | receptor | 259 | 260 |
| | subfamily C, member 1 | | | | |
| TMTC4 | transmembrane and | NM_001079669; | other | 261 | 262 |
| | tetratricopeptide repeat | NM_032813 | | | |
| | containing 4 | | | | |
| CLCN4 | chloride channel 4 | NM_001830 | transport | 263 | 264 |
| OR12D3 | olfactory receptor, family | NM_030959 | receptor | 265 | 266 |
| | 12, subfamily D, member 3 | | | | |
| BTNL8 | Butyrophilin-like protein 8 | NM_024850; | other | 267 | 268 |
| | precursor | NM_001040462, | | | |
| | | NM_001159707, | | | |
| | | NM_001159708, | | | |
| | | NM_001159709, | | | |
| | | NM_001159710 | | | |
| SLC7A14 | solute carrier, family 7 | NM_020949 | transport | 269 | 270 |
| | member 14 | | | | |
| OR7D4 | olfactory receptor, family 7 | NM_001005191.1 | receptor | 271 | 272 |
| | subfamily D member 4 | | | | |
| MUC12 | mucin 12, cell surface | AF147791 | other | 273 | 274 |
| | associated | | | | |
| TRGC2 | T-cell receptor gamma chain | BC039116 | receptor | 275 | 276 |
| | C region PT-gamma-1/2 | | | | |
| DEF109P1B | DEFb109—Defensin beta | NR_003668 | other | 277 | 278 |
| | 109 | | | | |
| KCNIP1 | Kv channel interacting | NM_001034837 | transport | 279 | 280 |
| | protein 1 (variant 1) | | | | |
| SLC45A4 | solute carrier family 45, | BC033223 | transport | 281 | 282 |
| | member 4 | | | | |
| ENPP6 | ectonucleotide | NM_153343 | enzyme | 283 | 284 |
| | pyrophosphatase/ | | | | |
| | phosphodiesterase 6 | | | | |
| PCDHB8 | protocadherin beta 8 | NM_019120 | cell adhesion | 285 | 286 |
| OR2T3 | olfactory receptor, family 2, | NM_001005495 | other | 287 | 288 |
| | sub family T, member 3 | | | | |
| OR5M10 | olfactory receptor family 5, | NM_001004741 | receptor | 289 | 290 |
| | subfamily M, member 10 | | | | |
| OR4S1 | olfactory receptor family 4, | NM_001004725 | receptor | 291 | 292 |
| | subfamily S, member 1 | | | | |
| GPR83 | G protein-coupled receptor | NM_016540 | receptor | 293 | 294 |
| | 83 | | | | |
| TAS2R19 | taste receptor, type 2, | NM_176888 | other | 295 | 296 |
| | member 19 | | | | |
| KAL1 | Kallmann syndrome 1 | NM_000216 | other | 297 | 298 |
| | sequence | | | | |
| SLCO1B3 | solute carrier organic anion | NM_019844 | transport | 299 | 300 |
| | transporter family, member | | | | |
| | 1B3 | | | | |
| | Gene and two pseudogenes | AL133267 | receptor | 301 | 302 |
| | for 7 transmembrane | | | | |
| | receptor (rhodopsin family) | | | | |
| | (olfactory receptor like) | | | | |
| | proteins and a 60S acidic | | | | |
| | ribosomal protein P2 | | | | |
| | (RPLP2) pseudogene | | | | |
| HLA_DQB1 | major histocompatability | M60028 | receptor | 303 | 304 |
| | complex, class II, DQ beta 1 | | | | |
| ALCAM | CD166 (ALCAM) activated | NM_001627 | cell adhesion | 305 | 306 |
| | leukocyte cell adhesion | | | | |
| | molecule | | | | |
| IL20RB | IL-20Rbeta—Interleukin 20 | NM_144717 | receptor | 307 | 308 |
| | receptor beta | | | | |
| PDPN | podoplanin-differentiation | NM_001006624; | transport | 309 | 310 |
| | factor; O-glycosylated | NM_006474, | | | |
| | | NM_198389, | | | |
| | | NM_001006625 | | | |
| CHRM3 | cholinergic receptor, | NM_000740 | receptor | 311 | 312 |
| | muscarinic 3 | | | | |
| ITGB1 | intergrin, beta 1 (fibronectin | NM_002211; | receptor | 313 | 314 |
| | receptor, beta polypeptide, | NM_133376, | | | |
| | antigen CD29 includes | NM_033668 | | | |
| | MDF2, MSK12) | | | | |
| SIGLEC8 | sialic acid binding Ig-like | NM_014442 | receptor | 315 | 316 |
| | lectin 8, CD329 | | | | |
| RAP1A | RAS-related protein RAP1A | NM_001010935; | enzyme | 317 | 318 |
| | | NM_002884 | | | |
| PLXNA2 | Plexin A2 | NM_025179 | receptor | 319 | 320 |
| KIR2DL3 | CD158b (KIR2DL3) killer | NM_014511 | receptor | 321 | 322 |
| | cell immunoglobulin-like | | | | |
| | receptor, 2 domains, ligand 3 | | | | |
| KLRK1 | CD314, killer cell lectin-like | NM_007360.2 | receptor | 323 | 324 |
| | receptor, subfamily K, | | | | |
| | member 1 | | | | |
| CX3CR1 | chemokine (C-X3-C) | NM_001337; | receptor | 325 | 326 |
| | receptor 1, CCRL1 | NM_001171171, | | | |
| | | NM_001171172, | | | |
| | | NM_001171174 | | | |
| GPR174 | G protein-coupled receptor | NM_032553 | receptor | 327 | 328 |
| | 174 | | | | |

* All accession numbers are based on databases as at 5 Oct. 2010.

[0723] In one example, a protein or nucleic acid falls within a class set out in any of Tables 2-6.

TABLE 2
Cell adhesion proteins and nucleic acids encoding same that are upregulated in, on or secreted from EPCs.

| | | | | Exemplary | Exemplary |
|---|---|---|---|---|---|
| | | Reference | | Nucleotide | Amino Acid |
| Gene ID | Entrez Gene Name | Sequence(s) | Category | SEQ ID NO | SEQ ID NO |
| DSG2 | desmoglein 2 | NM_001943 | cell adhesion | 15 | 16 |
| EMB | embigin homolog | NM_198449; | cell adhesion | 1 | 2 |
| | | NR_003955 | | | |
| SIGLEC10 | sialic acid binding Ig-like | NM_033130; | cell adhesion | 23 | 24 |
| | lectin 10 | NM_001171156; | | | |
| | | NM_001171157; | | | |
| | | NM_001171158; | | | |
| | | NM_001171159; | | | |
| | | NM_001171160; | | | |
| | | NM_001171161 | | | |
| SIGLEC6 | sialic acid binding Ig-like | NM_001245; | cell adhesion | 25 | 26 |
| | lectin 6 | NM_198845; | | | |
| | | NM_198846; | | | |
| | | NM_001177547; | | | |
| | | NM_001177548; | | | |
| | | NM_001177549 | | | |
| PLXNC1 | plexin C1 | NM_005761 | cell adhesion | 7 | 8 |
| CLDN20 | claudin 20 | NM_001001346 | cell adhesion | 101 | 102 |
| CLDN10 | claudin 10 | NM_182848; | cell adhesion | 107 | 108 |
| | | NM_006984 | | | |
| MFAP4 | microfibrillar-associated | NM_002404 | cell adhesion | 131 | 132 |
| | protein 4 | | | | |
| OMD | osteomodulin | NM_005014 | cell adhesion | 139 | 140 |
| ECM2 | extracellular matrix protein | NM_001393 | cell adhesion | 149 | 150 |
| | 2, female organ and | | | | |
| | adipocyte specific | | | | |
| NPTN_HUMAN | neuroplastin | Q9Y639; B7Z4D3; | cell adhesion | 155 | 156 |
| | | B7ZLL2; Q17R52; | | | |
| | | Q59EJ9; Q6NVX7; | | | |
| | | Q9Y640 | | | |
| DSG3_HUMAN | desmoglein 3 (pemphigus | P32926; A8K2V2 | cell adhesion | 161 | 162 |
| | vulgaris antigen) | | | | |
| CLDN17 | Claudin-17 | P56750; Q3MJB5; | cell adhesion | 173 | 174 |
| | | Q6UY37 | | | |
| FAT2 | Protocadherin Fat 2 | Q9NYQ8; O75091; | cell adhesion | 195 | 196 |
| | | Q9NSR7 | | | |
| PCDHA4 | Protocadherin alpha-4 | Q9UN74; O75285; | cell adhesion | 203 | 204 |
| | | Q2M253 | | | |
| PCDHAC1 | Protocadherin alpha-C1 | Q9H158; Q9Y5F5; | cell adhesion | 205 | 206 |
| | | Q9Y5I5 | | | |
| NFASC | NFASC—neurofascin | NM_015090; | cell adhesion | 251 | 252 |
| | homolog (chicken) | NM_001005388, | | | |
| | | NM_001160331, | | | |
| | | NM_001160332, | | | |
| | | NM_001160333, | | | |
| | | NM_001005389 | | | |
| PCDHB8 | protocadherin beta 8 | NM_019120 | cell adhesion | 285 | 286 |
| ALCAM | CD166 (ALCAM) activated | NM_001627 | cell adhesion | 305 | 306 |
| | leukocyte cell adhesion | | | | |
| | molecule | | | | |

[0724] In one example, the protein is a cadherin (e.g., a desmoglein and/or a protocadherin) or the nucleic acid encodes same. For example, the protein is selected from the group consisting of desmoglein 2, desmoglein 3, Protocadherin Fat 2, Protocadherin alpha-4, Protocadherin alpha-C1 and protocadherin beta 8 or the nucleic acid encodes same.

[0725] In one example, the protein is a lectin or the nucleic acid encodes same. For example, the protein is selected from the group consisting of sialic acid binding Ig-like lectin 10, sialic acid binding Ig-like lectin 6 or the nucleic acid encodes same.

[0726] In one example, the protein is an immunoglobulin, cell adhesion protein, such as an embigin homolog or sialic acid binding Ig-like lectin 10 or sialic acid binding Ig-like lectin 6 or ALCAM pr the nucleic acid encodes same. In this regard, an immunoglobulin, cell adhesion protein is a cell adhesion protein comprising an immunoglobulin domain. The skilled artisan will be aware that an immunoglobulin domain is an art recognized protein structure, which generally (however not necessarily) comprises a 2-layer sandwich of between 7 and 9 antiparallel β-strands arranged in two β-sheets. For example, the immunoglobulin, cell adhesion protein is a member of the immunoglobulin superfamily.

TABLE 3
Transport proteins and nucleic acids encoding same that are upregulated in, on or secreted from EPCs.

| | | | | Exemplary | Exemplary |
|---|---|---|---|---|---|
| | | Reference | | Nucleotide | Amino Acid |
| Gene ID | Entrez Gene Name | Sequence(s) | Category | SEQ ID NO | SEQ ID NO |
| SLC39A8 | solute carrier family 39 | NM_022154; | transport | 3 | 4 |
| | (zinc transporter), member 8 | NM_001135148; | | | |
| | | NM_001135147; | | | |
| | | NM_001135146 | | | |
| PKD2L1 | polycystic kidney disease 2- | Q9P0L9; O75972; | transport | 227 | 228 |
| | like 1 protein | Q5W039; Q9UP35; | | | |
| | | Q9UPA2 | | | |
| SLC1A5 | Neutral amino acid | Q15758; A8K9H5; | transport | 225 | 226 |
| | transporter B(0) | D0EYG6; O95720; | | | |
| | | Q96RL9; Q9BWQ3; | | | |
| | | Q9UNP2 | | | |
| SORL1(LRP9) | sortilin-related receptor, | NM_003105 | transport | 45 | 46 |
| | L(DLR class) A repeats- | | | | |
| | containing | | | | |
| SLC15A2 | solute carrier family 15 | NM_021082; | transport | 19 | 20 |
| | (H+/peptide transporter), | NM_001145998 | | | |
| | member 2 | | | | |
| SLC22A16 | solute carrier family 22 | NM_033125 | transport | 49 | 50 |
| | (organic cation/carnitine | | | | |
| | transporter), member 16 | | | | |
| SLC24A3 | solute carrier family 24 | NM_020689 | transport | 51 | 52 |
| | (sodium/potassium/calcium | | | | |
| | exchanger), member 3 | | | | |
| SLC2A5 | solute carrier family 2 | NM_003039; | transport | 53 | 54 |
| | (facilitated glucose/fructose | NM_001135585 | | | |
| | transporter), member 5 | | | | |
| SLC1A3 | solute carrier family 1 (glial | NM_004172; | transport | 103 | 104 |
| | high affinity glutamate | NM_001166695; | | | |
| | transporter), member 3 | NM_001166696 | | | |
| ABCC4 | ATP-binding cassette, sub- | NM_005845\| | transport | 43 | 44 |
| | family C (CFTR/MRP), | NM_001105515 | | | |
| | member 4 | | | | |
| SLC16A6 | solute carrier family 16, | NM_004694; | transport | 21 | 22 |
| | member 6 (monocarboxylic | NM_001174166 | | | |
| | acid transporter 7) | | | | |
| SLC8A1 | solute carrier family 8 | NM_021097; | transport | 47 | 48 |
| | (sodium/calcium exchanger), | NM_001112800; | | | |
| | member 1 | NM_001112801; | | | |
| | | NM_001112802 | | | |
| KCNQ5 | potassium voltage-gated | NM_019842; | transport | 59 | 60 |
| | channel | NM_001160130; | | | |
| | | NM_001160132; | | | |
| | | NM_001160133; | | | |
| | | NM_001160134 | | | |
| KCNAB2 | potassium voltage-gated | NM_003636 | transport | 83 | 84 |
| | channel, shaker-related | NM_172130 | | | |
| | subfamily, beta member 2 | | | | |
| KCNE3 | potassium voltage-gated | NM_005472 | transport | 85 | 86 |
| | channel, Isk-related family, | | | | |
| | member 3 | | | | |
| MLC1 | megalencephalic | NM_015166 | transport | 89 | 90 |
| | leukoencephalopathy with | NM_139202 | | | |
| | subcortical cysts 1 | | | | |
| FLVCR1 | feline leukemia virus | NM_014053 | transport | 93 | 94 |
| | subgroup C cellular receptor | | | | |
| | 1 | | | | |
| SLC1A4 | solute carrier family 1 | NM_003038; | transport | 105 | 106 |
| | (glutamate/neutral amino | NM_001193493 | | | |
| | acid transporter), member 4 | | | | |
| LAPTM5 | lysosomal protein | NM_006762 | transport | 113 | 114 |
| | transmembrane 5 | | | | |
| VAMP8 | vesicle-associated | NM_003761 | transport | 115 | 116 |
| | membrane protein 8 | | | | |
| | (endobrevin) | | | | |
| AKAP7 | A kinase (PRKA) anchor | NM_016377; | transport | 117 | 118 |
| | protein 7 | NM_138633; | | | |
| | | NM_004842 | | | |
| SLC38A1 | solute carrier family 38, | NM_001077484; | transport | 121 | 122 |
| | member 1 | Q9H2H9; | | | |
| | | NM_030674; | | | |
| | | Q9H2H9 | | | |
| CD302 | CD302 molecule | NM_014880 | receptor | 123 | 124 |
| GBRA3_HUMAN | gamma-aminobutyric acid | P34903; Q8TAF9 | transport | 159 | 160 |
| | (GABA) A receptor, alpha 3 | | | | |
| CRCM1_HUMAN | ORAI calcium release- | Q96D31; Q3MHV3; | transport | 165 | 166 |
| | activated calcium modulator | Q6DHX2; Q96BP7; | | | |
| | 1 | Q96K71 | | | |
| ACCN4 | Amiloride-sensitive cation | Q96FT7; Q53SB7; | transport | 187 | 188 |
| | channel 4 | Q6GMS1; Q6PIN9; | | | |
| | | Q9NQA4 | | | |
| CACNA1D | Voltage-dependent L-type | Q01668; Q13916; | transport | 189 | 190 |
| | calcium channel subunit | Q13931; Q9UDC3 | | | |
| | alpha-1D | | | | |
| SCN5A | Sodium channel protein type | Q14524; A5H1P8; | transport | 209 | 210 |
| | 5 subunit alpha | A6N922; A6N923; | | | |
| | | B2RTU0; Q75RX9; | | | |
| | | Q75RY0; Q86UR3; | | | |
| | | Q8IZC9; Q96J69 | | | |
| SERINC5 | Serine incorporator 5 | Q86VE9; Q495A4; | transport | 211 | 212 |
| | | Q495A6 | | | |
| SLC12A1 | Solute carrier family 12 | Q13621; A8JYA2 | transport | 213 | 214 |
| | member 1 | | | | |
| SLC46A1 | Proton-coupled folate | Q96NT5; Q1HE20; | transport | 215 | 216 |
| | transporter | Q86T92; Q8TEG3; | | | |
| | | Q96FL0 | | | |
| SLCO1B1 | Solute carrier organic anion | Q9Y6L6; B2R7G2; | transport | 217 | 218 |
| | transporter family member | Q9NQ37; Q9UBF3; | | | |
| | 1B1 | Q9UH89 | | | |
| ANO2 | Anoctamin-2 | Q9NQ90; C4N787; | transport | 219 | 220 |
| | | Q9H847 | | | |
| ABCA12 | ATP-binding cassette sub- | Q86UK0; Q53QE2; | transport | 221 | 222 |
| | family A member 12 | Q53S55; Q8IZW6; | | | |
| | | Q96JT3; Q9Y4M5 | | | |
| ATP10A | Probable phospholipid- | O60312; Q969I4 | transport | 229 | 230 |
| | transporting ATPase VA | | | | |
| CACNA1B | Voltage-dependent N-type | Q00975; B1AQK5 | transport | 235 | 236 |
| | calcium channel subunit | | | | |
| | alpha-1B | | | | |
| AMPA2 | glutamate receptor, | NM_000826; | transport | 247 | 248 |
| | ionotropic, AMPA2 | NM_001083619, | | | |
| | | NM_001083620 | | | |
| SYT15 | synaptotagmin XV | NM_031912, | transport | 249 | 250 |
| | | NM_181519 | | | |
| SLC30A10 | solute carrier family 30, | NM_001004433 | transport | 255 | 256 |
| | member 10 | | | | |
| CLCN4 | chloride channel 4 | NM_001830 | transport | 263 | 264 |
| SLC7A14 | solute carrier, family 7 | NM_020949 | transport | 269 | 270 |
| | member 14 | | | | |
| KCNIP1 | Kv channel interacting | NM_001034837 | transport | 279 | 280 |
| | protein 1 (variant 1) | | | | |
| SLC45A4 | solute carrier family 45, | BC033223 | transport | 281 | 282 |
| | member 4 | | | | |
| SLCO1B3 | solute carrier organic anion | NM_019844 | transport | 299 | 300 |
| | transporter family, member | | | | |
| | 1B3 | | | | |
| PDPN | podoplanin-differentiation | NM_001006624; | transport | 309 | 310 |
| | factor; O-glycosylated | NM_006474, | | | |
| | | NM_198389, | | | |
| | | NM_001006625 | | | |

[0727] In one example, the protein is a solute carrier family protein or the nucleic acid encodes same. For example, the protein is selected from the group consisting of solute carrier family 39 (zinc transporter), member 8, solute carrier family 15 (H+/peptide transporter), member 2, solute carrier family 16, member 6 (monocarboxylic acid transporter 7), solute carrier family 8 (sodium/calcium exchanger), member 1, solute carrier family 22 (organic cation/carnitine transporter), member 16, solute carrier family 24 (sodium/potassium/calcium exchanger), member 3, solute carrier family 2 (facilitated glucose/fructose transporter), member 5, solute carrier family 1 (glial high affinity glutamate transporter), member 3, solute carrier family 1 (glutamate/neutral amino acid transporter), member 4, solute carrier family 38, member 1, solute carrier family 12 member 1, solute carrier family 30, member 10, solute carrier, family 7 member 14, solute carrier family 45, member 4 and solute carrier organic anion transporter family, member 1B3 or the nucleic acid encodes same.

[0728] In one example, the protein is an ion channel protein (e.g., a potassium channel and/or a sodium channel and/or a calcium channel) or a subunit thereof. For example, the protein is potassium voltage-gated channel, potassium voltage-gated channel, shaker-related subfamily, beta member 2, potassium voltage-gated channel, Isk-related family, member 3, amiloride-sensitive cation channel 4, voltage-dependent L-type calcium channel subunit alpha-1D, sodium channel protein type 5 subunit alpha, voltage-dependent N-type calcium channel subunit alpha-1B, chloride channel 4 and gamma-aminobutyric acid (GABA) A receptor, alpha 3 or the nucleic acid encodes same.

TABLE 4
Growth factor proteins and nucleic acids encoding same
that are upregulated in, on or secreted from EPCs.

| | | | | Exemplary | Exemplary |
|---|---|---|---|---|---|
| | | Reference | | Nucleotide | Amino Acid |
| Gene ID | Entrez Gene Name | Sequence(s) | Category | SEQ ID NO | SEQ ID NO |
| AREG | amphiregulin | NM_001657 | growth factor | 27 | 28 |
| NRG4 | neuregulin 4 | NM_138573 | growth factor | 37 | 38 |
| EPGN | epithelial mitogen | NM_001013442 | growth factor | 39 | 40 |
| | homolog (mouse) | | | | |
| OGN | osteoglycin | NM_033014; | growth factor | 137 | 138 |
| | | NM_014057 | | | |
| NPTN_HUMAN | neuroplastin | Q9Y639; B7Z4D3; | cell adhesion | 155 | 156 |
| | | B7ZLL2; Q17R52; | | | |
| | | Q59EJ9; Q6NVX7; | | | |
| | | Q9Y640 | | | |

TABLE 5
Receptor proteins and nucleic acids encoding same that are upregulated in, on or secreted from EPCs.

| | | | | Exemplary | Exemplary |
|---|---|---|---|---|---|
| | | Reference | | Nucleotide | Amino Acid |
| Gene ID | Entrez Gene Name | Sequence(s) | Category | SEQ ID NO | SEQ ID NO |
| EMR2 | egf-like module containing, | NM_013447; | receptor | 17 | 18 |
| | mucin-like, hormone | NM_152916; | | | |
| | receptor-like 2 | NM_152919; | | | |
| | | NM_152917; | | | |
| | | NM_152920; | | | |
| | | NM_152921; | | | |
| | | NM_152918 | | | |
| SIRPB1 | signal-regulatory protein | NM_006065 | receptor | 331 | 332 |
| | beta 1 | | | | |
| CSF2RA | GM-CSF receptor subunit | NM_006140 | receptor | 333 | 334 |
| | alpha precursor | NM_172245 | | | |
| | | NM_172246 | | | |
| | | NM_172247 | | | |
| | | NM_172249 | | | |
| | | NM_001161529 | | | |
| | | NM_001161530 | | | |
| | | NM_001161531 | | | |
| | | NR_027760 | | | |
| | | NM_001161532 | | | |
| CNR2 | cannabinoid receptor 2 | NM_001841 | receptor | 33 | 34 |
| | (macrophage) | | | | |
| OR52B6 | olfactory receptor, family | NM_001005162 | receptor | 11 | 12 |
| | 52, subfamily B, member 6 | | | | |
| P2RY14 | purinergic receptor P2Y, G- | NM_014879; | receptor | 61 | 62 |
| | protein coupled, 14 | Q15391; | | | |
| | | BC034989; | | | |
| | | Q15391; | | | |
| | | NM_001081455 | | | |
| HTR1F | 5-hydroxytryptamine | NM_000866; | receptor | 63 | 64 |
| | (serotonin) receptor 1F | Q4QRI9; | | | |
| | | BC069125; | | | |
| | | P30939; | | | |
| | | BC069125; | | | |
| | | Q4QRI9 | | | |
| GPR183 | G protein-coupled receptor | NM_004951 | receptor | 67 | 68 |
| | 183 | | | | |
| OR13D1 | olfactory receptor, family | NM_001004484 | receptor | 69 | 70 |
| | 13, subfamily D, member 1 | | | | |
| TAS2R4 | taste receptor, type 2, | NM_016944 | receptor | 73 | 74 |
| | member 4 | | | | |
| GPR18 | G protein-coupled receptor | NM_005292; | receptor | 75 | 76 |
| | 18 | NM_001098200 | | | |
| TAS2R3 | taste receptor, type 2, | NM_016943 | receptor | 77 | 78 |
| | member 3 | | | | |
| MR1 | major histocompatibility | NM_001531; | receptor | 79 | 80 |
| | complex, class I-related | Q95460; U22963; | | | |
| | | Q53GM1; | | | |
| | | NM_001531; | | | |
| | | Q53GM1; U22963; | | | |
| | | Q95460; | | | |
| | | NM_001194999, | | | |
| | | NM_001195000, | | | |
| | | NM_001195035 | | | |
| GPR34 | G protein-coupled receptor | NM_001097579 | receptor | 81 | 82 |
| | 34 | NM_005300 | | | |
| GPR65 | G protein-coupled receptor | NM_003608 | receptor | 95 | 96 |
| | 65 | | | | |
| OPN3 | opsin 3 | NM_014322; | receptor | 97 | 98 |
| | | NM_001821 | | | |
| TAS2R13 | taste receptor, type 2, | NM_023920 | receptor | 99 | 100 |
| | member 13 | | | | |
| SEMA3C | sema domain, | NM_006379 | receptor | 119 | 120 |
| | immunoglobulin domain | | | | |
| | (Ig), short basic domain, | | | | |
| | secreted, (semaphorin) 3C | | | | |
| CD302 | CD302 molecule | NM_014880 | receptor | 123 | 124 |
| CELR2_HUMAN | cadherin, EGF LAG seven- | Q9HCU4; Q5T2Y7; | receptor | 153 | 154 |
| | pass G-type receptor 2 | Q92566 | | | |
| | (flamingo homolog, | | | | |
| | Drosophila) | | | | |
| PLXB2_HUMAN | plexin B2 | O15031; A6QRH0; | receptor | 163 | 164 |
| | | Q7KZU3; Q9BSU7 | | | |
| DAG1 | Dystroglycan | Q14118; A8K6M7; | receptor | 167 | 168 |
| | | Q969J9 | | | |
| MPZL1 | Myelin protein zero-like | O95297; B2REB9; | receptor | 171 | 172 |
| | protein 1 | Q5R332; Q8IX11; | | | |
| | | Q9BWZ3; Q9NYK4; | | | |
| | | Q9UL20 | | | |
| GPR125 | Probable G-protein coupled | Q8IWK6; Q6UXK9; | receptor | 175 | 176 |
| | receptor 125 | Q86SQ5; Q8TC55 | | | |
| ODZ3 | Teneurin-3 | Q9P273; Q5XUL9; | receptor | 181 | 182 |
| | | Q96SY2; Q9NV77; | | | |
| | | Q9NVW1; Q9NZJ2 | | | |
| DCC | Netrin receptor DCC | P43146 | receptor | 183 | 184 |
| LRP12 | Low-density lipoprotein | Q9Y561; A8K137 | receptor | 197 | 198 |
| | receptor-related protein 12 | | | | |
| NPY2R | Neuropeptide Y receptor | P49146; Q13281; | receptor | 199 | 200 |
| | type 2 | Q13457; Q4W5G7; | | | |
| | | Q6AZZ6; Q9UE67 | | | |
| OR11H4 | Olfactory receptor 11H4 | Q8NGC9; B2RNQ4; | receptor | 201 | 202 |
| | | Q6IF07 | | | |
| CHRNG | Acetylcholine receptor | P07510; B3KWM8; | receptor | 231 | 232 |
| | subunit gamma | Q53RG2 | | | |
| ILDR1 | immunoglobulin-like | NM_175924 | receptor | 241 | 242 |
| | domain containing receptor | | | | |
| | 1 | | | | |
| OR1C1 | Olfactory receptor, family 1, | NM_012353 | receptor | 259 | 260 |
| | subfamily C, member 1 | | | | |
| OR12D3 | olfactory receptor, family | NM_030959 | receptor | 265 | 266 |
| | 12, subfamily D, member 3 | | | | |
| OR7D4 | olfactory receptor, family 7 | NM_001005191.1 | receptor | 271 | 272 |
| | subfamily D member 4 | | | | |
| TRGC2 | T-cell receptor gamma chain | BC039116 | receptor | 275 | 276 |
| | C region PT-gamma-1/2 | | | | |
| OR5M10 | olfactory receptor family 5, | NM_001004741 | receptor | 289 | 290 |
| | subfamily M, member 10 | | | | |
| OR4S1 | olfactory receptor family 4, | NM_001004725 | receptor | 291 | 292 |
| | subfamily S, member 1 | | | | |
| GPR83 | G protein-coupled receptor | NM_016540 | receptor | 293 | 294 |
| | 83 | | | | |
| | Gene and two pseudogenes | AL133267 | receptor | 301 | 302 |
| | for 7 transmembrane | | | | |
| | receptor (rhodopsin family) | | | | |
| | (olfactory receptor like) | | | | |
| | proteins and a 60S acidic | | | | |
| | ribosomal protein P2 | | | | |
| | (RPLP2) pseudogene | | | | |
| HLA_DQB1 | major histocompatability | M60028 | receptor | 303 | 304 |
| | complex, class II, DQ beta 1 | | | | |
| IL20RB | IL-20Rbeta—Interleukin 20 | NM_144717 | receptor | 307 | 308 |
| | receptor beta | | | | |
| CHRM3 | cholinergic receptor, | NM_000740 | receptor | 311 | 312 |
| | muscarinic 3 | | | | |
| ITGB1 | intergrin, beta 1 (fibronectin | NM_002211; | receptor | 313 | 314 |
| | receptor, beta polypeptide, | NM_133376, | | | |
| | antigen CD29 includes | NM_033668 | | | |
| | MDF2, MSK12) | | | | |
| SIGLEC8 | sialic acid binding Ig-like | NM_014442 | receptor | 315 | 316 |
| | lectin 8, CD329 | | | | |
| PLXNA2 | Plexin A2 | NM_025179 | receptor | 319 | 320 |
| KIR2DL3 | CD158b (KIR2DL3) killer | NM_014511 | receptor | 321 | 322 |
| | cell immunoglobulin-like | | | | |
| | receptor, 2 domains, ligand 3 | | | | |
| KLRK1 | CD314, killer cell lectin-like | NM_007360.2 | receptor | 323 | 324 |
| | receptor, subfamily K, | | | | |
| | member 1 | | | | |
| CX3CR1 | chemokine (C-X3-C) | NM_001337; | receptor | 325 | 326 |
| | receptor 1, CCRL1 | NM_001171171, | | | |
| | | NM_001171172, | | | |
| | | NM_001171174 | | | |
| GPR174 | G protein-coupled receptor | NM_032553 | receptor | 327 | 328 |
| | 174 | | | | |

[0729] In one example, the protein is an olfactory receptor, or the nucleic acid encodes same. For example, the protein is selected from the group consisting of olfactory receptor, family 52, subfamily B, member 6, olfactory receptor, family 13, subfamily D, member 1, Olfactory receptor 11H4, olfactory receptor, family 1, subfamily C, member 1, olfactory receptor, family 7 subfamily D member 4, olfactory receptor family 5, subfamily M, member 10 and olfactory receptor family 4, subfamily S, member 1 or the nucleic acid encodes same.

[0730] In another example, the protein is a taste receptor. For example, the protein is selected from the group consisting of taste receptor, type 2, member 4, taste receptor, type 2, member 3, taste receptor, type 2, member 13, and taste receptor, type 2, member 1 or the nucleic acid encodes same.

[0731] In a further example, the protein is a G protein coupled receptor. For example, the protein is selected from the group consisting of G protein-coupled receptor 183, G protein-coupled receptor 18, G protein-coupled receptor 34, Probable G-protein coupled receptor 125, G protein-coupled receptor 83, chemokine (C—X3-C) receptor 1 and G protein coupled receptor 174, CCRL1 or the nucleic acid encodes same.

TABLE 6
Enzyme proteins and nucleic acids encoding same that
are upregulated in, on or secreted from EPCs.

| | | | | Exemplary | Exemplary |
|---|---|---|---|---|---|
| | | Reference | | Nucleotide | Amino Acid |
| Gene ID | Entrez Gene Name | Sequence(s) | Category | SEQ ID NO | SEQ ID NO |
| LOXL4 | lysyl oxidase-like 4 | NM_032211 | enzyme | 337 | 338 |
| ADCY7 | adenylate cyclase 7 | NM_001114 | enzyme | 13 | 14 |
| NCSTN | Nicastrin | Q92542; Q5T207; | enzyme | 177 | 178 |
| | | Q86VV5 | | | |
| INSRR | insulin receptor-related | P14616; O60724; | enzyme | 233 | 234 |
| | protein | Q5VZS3 | | | |
| DPP6 | dipeptidyl aminopeptidase- | P42658 | enzyme | 193 | 194 |
| | like protein 6 | | | | |
| ADAM10 | Disintegrin and | NM_001110 | enzyme | 329 | 330 |
| | metalloproteinase domain- | | | | |
| | containing protein 10 | | | | |
| PRSS21 | protease, serine, 21 | NM_006799; | enzyme | 35 | 36 |
| | (testisin) | NM_144956; | | | |
| | | NM_144957 | | | |
| RHBDD1 | rhomboid domain | NM_032276; | enzyme | 41 | 42 |
| | containing 1 | NM_001167608 | | | |
| ENPP5 | ectonucleotide | NM_021572 | enzyme | 91 | 92 |
| | pyrophosphatase/phosphodi- | | | | |
| | esterase 5 (putative function) | | | | |
| ADAMTS2 | ADAM metallopeptidase | NM_014244; | enzyme | 109 | 110 |
| | with thrombospondin type 1 | NM_021599 | | | |
| | motif, 2 | | | | |
| TBXAS1 | thromboxane A synthase 1 | NM_001061; | enzyme | 111 | 112 |
| | (platelet) | NM_030984; | | | |
| | | NM_001130966, | | | |
| | | NM_001166253, | | | |
| | | NM_001166254 | | | |
| PLBD1 | phospholipase B domain | NM_024829 | enzyme | 125 | 126 |
| | containing 1 | | | | |
| LOXL3 | lysyl oxidase-like 3 | NM_032603 | enzyme | 127 | 128 |
| CPM | Carboxypeptidase M | P14384; B2R800; | enzyme | 223 | 224 |
| | | Q9H2K9 | | | |
| NLGN1 | EST (IMAGE: 2110090) | AI401535 | enzyme | 253 | 254 |
| ENPP6 | ectonucleotide | NM_153343 | enzyme | 283 | 284 |
| | pyrophosphatase/ | | | | |
| | phosphodiesterase 6 | | | | |
| RAP1A | RAS-related protein RAP1A | NM_001010935; | enzyme | 317 | 318 |
| | | NM_002884 | | | |

[0732] In one example, the protein is a peptidase and/or a protease, or the nucleic acid encodes same. For example, the protein is selected from the group consisting of protease, serine, 21 (testisin), Disintegrin and metalloproteinase domain-containing protein 10, ADAM metallopeptidase with thrombospondin type 1 motif, 2, dipeptidyl aminopeptidase-like protein 6, and carboxypeptidase M or the nucleic acid encodes same.

[0733] In one example, a protein comprises an immunoglobulin domain or an immunoglobulin-like domain. Exemplary proteins falling within this class are embigin, Siglec6, Siglec8, Siglec10, VSIG4, SEMA3C, ILDR1, TRGC2, ALCAM, HLA-DQB1, NFASC, and KIR2DL3.

[0734] An exemplary protein or nucleic acid comprises a sequence at least about 75% nucleotide or amino acid sequence identity to the nucleotide or amino acid sequence set forth in any one of Tables 1 to 6, for example at least about 80% sequence identity, preferably at least about 85%, such as at least about 90%, such as at least about 91%, e.g., at least about 92%, e.g., at least about 93%, e.g., at least about 94%, for example at least about 95% e.g., at least about 96%, e.g., at least about 97%, e.g., at least about 98%, for example at least about 99% or 100%. The present disclosure is not to be restricted to the use of the exemplified Homo sapiens nucleic acids or proteins because, as will be known to those skilled in the art, it is possible to identify naturally-occurring variants and/or mutants of said nucleic acids and/or proteins using standard techniques, including in silico analysis, e.g., using BLAST.

[0735] The % identity of a nucleic acid or polypeptide is determined by GAP (Needleman and Wunsch, 1970) analysis (GCG program) with a gap creation penalty=5, and a gap extension penalty=0.3. The query sequence is at least 50 residues in length, and the GAP analysis aligns the two sequences over a region of at least 50 residues. For example, the query sequence is at least 100 residues in length and the GAP analysis aligns the two sequences over a region of at least 100 residues. For example, the two sequences are aligned over their entire length.

[0736] In one example, reference to a protein or nucleic acid shall be taken to be reference to an embigin homolog protein or nucleic acid encoding same.

[0737] In one example, reference to a protein or nucleic acid shall be taken to be reference to a solute carrier family 39 (zinc transporter), member 8 protein or nucleic acid encoding same.

[0738] In one example, reference to a protein or nucleic acid shall be taken to be reference to a transmembrane 7 superfamily member 3 protein or nucleic acid encoding same.

[0739] In one example, reference to a protein or nucleic acid shall be taken to be reference to a plexin C1 protein or nucleic acid encoding same.

[0740] In one example, reference to a protein or nucleic acid shall be taken to be reference to a natural killer cell group 7 sequence protein or nucleic acid encoding same.

[0741] In one example, reference to a protein or nucleic acid shall be taken to be reference to an olfactory receptor, family 52, subfamily B, member 6 protein or nucleic acid encoding same.

[0742] In one example, reference to a protein or nucleic acid shall be taken to be reference to an adenylate cyclase 7 protein or nucleic acid encoding same.

[0743] In one example, reference to a protein or nucleic acid shall be taken to be reference to a desmoglein 2 protein or nucleic acid encoding same.

[0744] In one example, reference to a protein or nucleic acid shall be taken to be reference to an egf-like module containing, mucin-like, hormone receptor-like 2 protein or nucleic acid encoding same.

[0745] In one example, reference to a protein or nucleic acid shall be taken to be reference to a solute carrier family 15 (H+/peptide transporter), member 2 protein or nucleic acid encoding same.

[0746] In one example, reference to a protein or nucleic acid shall be taken to be reference to a solute carrier family 16, member 6 (monocarboxylic acid transporter 7) protein or nucleic acid encoding same.

[0747] In one example, reference to a protein or nucleic acid shall be taken to be reference to a sialic acid binding Ig-like lectin 10 protein or nucleic acid encoding same.

[0748] In one example, reference to a protein or nucleic acid shall be taken to be reference to a sialic acid binding Ig-like lectin 6 protein or nucleic acid encoding same.

[0749] In one example, reference to a protein or nucleic acid shall be taken to be reference to an amphiregulin protein or nucleic acid encoding same.

[0750] In one example, reference to a protein or nucleic acid shall be taken to be reference to an integral membrane protein 2A protein or nucleic acid encoding same.

[0751] In one example, reference to a protein or nucleic acid shall be taken to be reference to a glycoprotein M6B protein or nucleic acid encoding same.

[0752] In one example, reference to a protein or nucleic acid shall be taken to be reference to a cannabinoid receptor 2 (macrophage) protein or nucleic acid encoding same.

[0753] In one example, reference to a protein or nucleic acid shall be taken to be reference to a protease, serine, 21 (testisin) protein or nucleic acid encoding same.

[0754] In one example, reference to a protein or nucleic acid shall be taken to be reference to a neuregulin 4 protein or nucleic acid encoding same.

[0755] In one example, reference to a protein or nucleic acid shall be taken to be reference to an epithelial mitogen homolog (mouse) protein or nucleic acid encoding same.

[0756] In one example, reference to a protein or nucleic acid shall be taken to be reference to a rhomboid domain containing 1 protein or nucleic acid encoding same.

[0757] In one example, reference to a protein or nucleic acid shall be taken to be reference to an ATP-binding cassette, sub-family C(CFTR/MRP), member 4 protein or nucleic acid encoding same.

[0758] In one example, reference to a protein or nucleic acid shall be taken to be reference to a sortilin-related receptor, L(DLR class) A repeats-containing protein or nucleic acid encoding same.

[0759] In one example, reference to a protein or nucleic acid shall be taken to be reference to a solute carrier family 8 (sodium/calcium exchanger), member 1 protein or nucleic acid encoding same.

[0760] In one example, reference to a protein or nucleic acid shall be taken to be reference to a solute carrier family 22 (organic cation/carnitine transporter), member 16 protein or nucleic acid encoding same.

[0761] In one example, reference to a protein or nucleic acid shall be taken to be reference to a solute carrier family 24 (sodium/potassium/calcium exchanger), member 3 protein or nucleic acid encoding same.

[0762] In one example, reference to a protein or nucleic acid shall be taken to be reference to a solute carrier family 2 (facilitated glucose/fructose transporter), member 5 protein or nucleic acid encoding same.

[0763] In one example, reference to a protein or nucleic acid shall be taken to be reference to a NCK-associated protein 1-like protein or nucleic acid encoding same.

[0764] In one example, reference to a protein or nucleic acid shall be taken to be reference to an ecotropic viral integration site 2B protein or nucleic acid encoding same.

[0765] In one example, reference to a protein or nucleic acid shall be taken to be reference to a potassium voltage-gated channel protein or nucleic acid encoding same.

[0766] In one example, reference to a protein or nucleic acid shall be taken to be reference to a purinergic receptor P2Y, G-protein coupled, 14 protein or nucleic acid encoding same.

[0767] In one example, reference to a protein or nucleic acid shall be taken to be reference to a 5-hydroxytryptamine (serotonin) receptor 1F protein or nucleic acid encoding same.

[0768] In one example, reference to a protein or nucleic acid shall be taken to be reference to a T cell receptor associated transmembrane adaptor 1 protein or nucleic acid encoding same.

[0769] In one example, reference to a protein or nucleic acid shall be taken to be reference to a G protein-coupled receptor 183 protein or nucleic acid encoding same.

[0770] In one example, reference to a protein or nucleic acid shall be taken to be reference to an olfactory receptor, family 13, subfamily D, member 1 protein or nucleic acid encoding same.

[0771] In one example, reference to a protein or nucleic acid shall be taken to be reference to a V-set and immunoglobulin domain containing 4 protein or nucleic acid encoding same.

[0772] In one example, reference to a protein or nucleic acid shall be taken to be reference to a taste receptor, type 2, member 4 protein or nucleic acid encoding same.

[0773] In one example, reference to a protein or nucleic acid shall be taken to be reference to a G protein-coupled receptor 18 protein or nucleic acid encoding same.

[0774] In one example, reference to a protein or nucleic acid shall be taken to be reference to a taste receptor, type 2, member 3 protein or nucleic acid encoding same.

[0775] In one example, reference to a protein or nucleic acid shall be taken to be reference to a major histocompatibility complex, class I-related protein or nucleic acid encoding same.

[0776] In one example, reference to a protein or nucleic acid shall be taken to be reference to a G protein-coupled receptor 34 protein or nucleic acid encoding same.

[0777] In one example, reference to a protein or nucleic acid shall be taken to be reference to a potassium voltage-gated channel, shaker-related subfamily, beta member 2 protein or nucleic acid encoding same.

[0778] In one example, reference to a protein or nucleic acid shall be taken to be reference to a potassium voltage-gated channel, Isk-related family, member 3 protein or nucleic acid encoding same.

[0779] In one example, reference to a protein or nucleic acid shall be taken to be reference to a linker for activation of T cells family, member 2 protein or nucleic acid encoding same.

[0780] In one example, reference to a protein or nucleic acid shall be taken to be reference to a megalencephalic leukoencephalopathy with subcortical cysts 1 protein or nucleic acid encoding same.

[0781] In one example, reference to a protein or nucleic acid shall be taken to be reference to an ectonucleotide pyrophosphatase/phosphodiesterase 5 (putative function) protein or nucleic acid encoding same.

[0782] In one example, reference to a protein or nucleic acid shall be taken to be reference to a feline leukemia virus subgroup C cellular receptor 1 protein or nucleic acid encoding same.

[0783] In one example, reference to a protein or nucleic acid shall be taken to be reference to a G protein-coupled receptor 65 protein or nucleic acid encoding same.

[0784] In one example, reference to a protein or nucleic acid shall be taken to be reference to an opsin 3 protein or nucleic acid encoding same.

[0785] In one example, reference to a protein or nucleic acid shall be taken to be reference to a taste receptor, type 2, member 13 protein or nucleic acid encoding same.

[0786] In one example, reference to a protein or nucleic acid shall be taken to be reference to a claudin 20 protein or nucleic acid encoding same.

[0787] In one example, reference to a protein or nucleic acid shall be taken to be reference to a solute carrier family 1 (glial high affinity glutamate transporter), member 3 protein or nucleic acid encoding same.

[0788] In one example, reference to a protein or nucleic acid shall be taken to be reference to a solute carrier family 1 (glutamate/neutral amino acid transporter), member 4 protein or nucleic acid encoding same.

[0789] In one example, reference to a protein or nucleic acid shall be taken to be reference to a claudin 10 protein or nucleic acid encoding same.

[0790] In one example, reference to a protein or nucleic acid shall be taken to be reference to an ADAM metallopeptidase with thrombospondin type 1 motif, 2 protein or nucleic acid encoding same.

[0791] In one example, reference to a protein or nucleic acid shall be taken to be reference to a thromboxane A synthase 1 (platelet) protein or nucleic acid encoding same.

[0792] In one example, reference to a protein or nucleic acid shall be taken to be reference to a lysosomal protein transmembrane 5 protein or nucleic acid encoding same.

[0793] In one example, reference to a protein or nucleic acid shall be taken to be reference to a vesicle-associated membrane protein 8 (endobrevin) protein or nucleic acid encoding same.

[0794] In one example, reference to a protein or nucleic acid shall be taken to be reference to an A kinase (PRKA) anchor protein 7 protein or nucleic acid encoding same.

[0795] In one example, reference to a protein or nucleic acid shall be taken to be reference to a sema domain, immunoglobulin domain (Ig), short basic domain, secreted, (semaphorin) 3C protein or nucleic acid encoding same.

[0796] In one example, reference to a protein or nucleic acid shall be taken to be reference to a solute carrier family 38, member 1 protein or nucleic acid encoding same.

[0797] In one example, reference to a protein or nucleic acid shall be taken to be reference to a CD302 protein or nucleic acid encoding same.

[0798] In one example, reference to a protein or nucleic acid shall be taken to be reference to a phospholipase B domain containing 1 protein or nucleic acid encoding same.

[0799] In one example, reference to a protein or nucleic acid shall be taken to be reference to a lysyl oxidase-like 3 protein or nucleic acid encoding same.

[0800] In one example, reference to a protein or nucleic acid shall be taken to be reference to a family with sequence similarity 46, member C protein or nucleic acid encoding same.

[0801] In one example, reference to a protein or nucleic acid shall be taken to be reference to a microfibrillar-associated protein 4 protein or nucleic acid encoding same.

[0802] In one example, reference to a protein or nucleic acid shall be taken to be reference to an IQ motif containing B1 protein or nucleic acid encoding same.

[0803] In one example, reference to a protein or nucleic acid shall be taken to be reference to a fibrillin 2 protein or nucleic acid encoding same.

[0804] In one example, reference to a protein or nucleic acid shall be taken to be reference to an osteoglycin protein or nucleic acid encoding same.

[0805] In one example, reference to a protein or nucleic acid shall be taken to be reference to an osteomodulin protein or nucleic acid encoding same.

[0806] In one example, reference to a protein or nucleic acid shall be taken to be reference to an asporin protein or nucleic acid encoding same.

[0807] In one example, reference to a protein or nucleic acid shall be taken to be reference to a pregnancy-zone protein or nucleic acid encoding same.

[0808] In one example, reference to a protein or nucleic acid shall be taken to be reference to a hereditary sensory neuropathy, type II (WNK1) protein or nucleic acid encoding same.

[0809] In one example, reference to a protein or nucleic acid shall be taken to be reference to a serpin peptidase inhibitor, clade I (pancpin), member 2 protein or nucleic acid encoding same.

[0810] In one example, reference to a protein or nucleic acid shall be taken to be reference to an extracellular matrix protein 2, female organ and adipocyte specific protein or nucleic acid encoding same.

[0811] In one example, reference to a protein or nucleic acid shall be taken to be reference to an ER lipid raft associated 1 protein or nucleic acid encoding same.

[0812] In one example, reference to a protein or nucleic acid shall be taken to be reference to a cadherin, EGF LAG seven-pass G-type receptor 2 (flamingo homolog, Drosophila) protein or nucleic acid encoding same.

[0813] In one example, reference to a protein or nucleic acid shall be taken to be reference to a neuroplastin protein or nucleic acid encoding same.

[0814] In one example, reference to a protein or nucleic acid shall be taken to be reference to a protein encoded by chromosome 20 open reading frame 3 or nucleic acid encoding same.

[0815] In one example, reference to a protein or nucleic acid shall be taken to be reference to a gamma-aminobutyric acid (GABA) A receptor, alpha 3 protein or nucleic acid encoding same.

[0816] In one example, reference to a protein or nucleic acid shall be taken to be reference to a desmoglein 3 (pemphigus vulgaris antigen) protein or nucleic acid encoding same.

[0817] In one example, reference to a protein or nucleic acid shall be taken to be reference to a plexin B2 protein or nucleic acid encoding same.

[0818] In one example, reference to a protein or nucleic acid shall be taken to be reference to an ORAI calcium release-activated calcium modulator 1 protein or nucleic acid encoding same.

[0819] In one example, reference to a protein or nucleic acid shall be taken to be reference to a dystroglycan protein or nucleic acid encoding same.

[0820] In one example, reference to a protein or nucleic acid shall be taken to be reference to a transmembrane protein C14orf176 protein or nucleic acid encoding same.

[0821] In one example, reference to a protein or nucleic acid shall be taken to be reference to a myelin protein zero-like protein 1 protein or nucleic acid encoding same.

[0822] In one example, reference to a protein or nucleic acid shall be taken to be reference to a claudin-17 protein or nucleic acid encoding same.

[0823] In one example, reference to a protein or nucleic acid shall be taken to be reference to a probable G-protein coupled receptor 125 protein or nucleic acid encoding same.

[0824] In one example, reference to a protein or nucleic acid shall be taken to be reference to a nicastrin protein or nucleic acid encoding same.

[0825] In one example, reference to a protein or nucleic acid shall be taken to be reference to an uroplakin-1a protein or nucleic acid encoding same.

[0826] In one example, reference to a protein or nucleic acid shall be taken to be reference to a teneurin-3 protein or nucleic acid encoding same.

[0827] In one example, reference to a protein or nucleic acid shall be taken to be reference to a netrin receptor DCC protein or nucleic acid encoding same.

[0828] In one example, reference to a protein or nucleic acid shall be taken to be reference to an uncharacterized protein KIAA0090 protein or nucleic acid encoding same.

[0829] In one example, reference to a protein or nucleic acid shall be taken to be reference to an amiloride-sensitive cation channel 4 protein or nucleic acid encoding same.

[0830] In one example, reference to a protein or nucleic acid shall be taken to be reference to a voltage-dependent L-type calcium channel subunit alpha-1D protein or nucleic acid encoding same.

[0831] In one example, reference to a protein or nucleic acid shall be taken to be reference to a chondroitin sulfate proteoglycan 4 protein or nucleic acid encoding same.

[0832] In one example, reference to a protein or nucleic acid shall be taken to be reference to a dipeptidyl aminopeptidase-like protein 6 protein or nucleic acid encoding same.

[0833] In one example, reference to a protein or nucleic acid shall be taken to be reference to a protocadherin Fat 2 protein or nucleic acid encoding same.

[0834] In one example, reference to a protein or nucleic acid shall be taken to be reference to a low-density lipoprotein receptor-related protein 12 protein or nucleic acid encoding same.

[0835] In one example, reference to a protein or nucleic acid shall be taken to be reference to a neuropeptide Y receptor type 2 protein or nucleic acid encoding same.

[0836] In one example, reference to a protein or nucleic acid shall be taken to be reference to an olfactory receptor 11H4 protein or nucleic acid encoding same.

[0837] In one example, reference to a protein or nucleic acid shall be taken to be reference to a protocadherin alpha-4 protein or nucleic acid encoding same.

[0838] In one example, reference to a protein or nucleic acid shall be taken to be reference to a protocadherin alpha-Cl protein or nucleic acid encoding same.

[0839] In one example, reference to a protein or nucleic acid shall be taken to be reference to a rhomboid domain-containing protein 2 protein or nucleic acid encoding same.

[0840] In one example, reference to a protein or nucleic acid shall be taken to be reference to a sodium channel protein type 5 subunit alpha protein or nucleic acid encoding same.

[0841] In one example, reference to a protein or nucleic acid shall be taken to be reference to a serine incorporator 5 protein or nucleic acid encoding same.

[0842] In one example, reference to a protein or nucleic acid shall be taken to be reference to a solute carrier family 12 member 1 protein or nucleic acid encoding same.

[0843] In one example, reference to a protein or nucleic acid shall be taken to be reference to a proton-coupled folate transporter protein or nucleic acid encoding same.

[0844] In one example, reference to a protein or nucleic acid shall be taken to be reference to a solute carrier organic anion transporter family member 1B1 protein or nucleic acid encoding same.

[0845] In one example, reference to a protein or nucleic acid shall be taken to be reference to an anoctamin-2 protein or nucleic acid encoding same.

[0846] In one example, reference to a protein or nucleic acid shall be taken to be reference to an ATP-binding cassette sub-family A member 12 protein or nucleic acid encoding same.

[0847] In one example, reference to a protein or nucleic acid shall be taken to be reference to a carboxypeptidase M protein or nucleic acid encoding same.

[0848] In one example, reference to a protein or nucleic acid shall be taken to be reference to a neutral amino acid transporter B(0) protein or nucleic acid encoding same.

[0849] In one example, reference to a protein or nucleic acid shall be taken to be reference to a polycystic kidney disease 2-like 1 protein or nucleic acid encoding same.

[0850] In one example, reference to a protein or nucleic acid shall be taken to be reference to a probable phospholipid-transporting ATPase VA protein or nucleic acid encoding same.

[0851] In one example, reference to a protein or nucleic acid shall be taken to be reference to an acetylcholine receptor subunit gamma protein or nucleic acid encoding same.

[0852] In one example, reference to a protein or nucleic acid shall be taken to be reference to an insulin receptor-related protein or nucleic acid encoding same.

[0853] In one example, reference to a protein or nucleic acid shall be taken to be reference to a voltage-dependent N-type calcium channel subunit alpha-1B protein or nucleic acid encoding same.

[0854] In one example, reference to a protein or nucleic acid shall be taken to be reference to a sperm associated antigen 11B protein or nucleic acid encoding same.

[0855] In one example, reference to a protein or nucleic acid shall be taken to be reference to a Fraser Syndrome 1 protein or nucleic acid encoding same.

[0856] In one example, reference to a protein or nucleic acid shall be taken to be reference to an immunoglobulin-like domain containing receptor 1 protein or nucleic acid encoding same.

[0857] In one example, reference to a protein or nucleic acid shall be taken to be reference to an EPB41L1-erythrocyte membrane protein band 4.1 like 1 protein or nucleic acid encoding same.

[0858] In one example, reference to a protein or nucleic acid shall be taken to be reference to a B melanoma antigen protein or nucleic acid encoding same.

[0859] In one example, reference to a protein or nucleic acid shall be taken to be reference to a glutamate receptor, ionotropic, AMPA2 protein or nucleic acid encoding same.

[0860] In one example, reference to a protein or nucleic acid shall be taken to be reference to a synaptotagmin XV protein or nucleic acid encoding same.

[0861] In one example, reference to a protein or nucleic acid shall be taken to be reference to a NFASC-neurofascin homolog (chicken) protein or nucleic acid encoding same.

[0862] In one example, reference to a protein or nucleic acid shall be taken to be reference to a protein comprising a sequence encoded by EST IMAGE:2110090 or nucleic acid encoding same.

[0863] In one example, reference to a protein or nucleic acid shall be taken to be reference to a solute carrier family 30, member 10 protein or nucleic acid encoding same.

[0864] In one example, reference to a protein or nucleic acid shall be taken to be reference to an UNC-93 homologue A protein or nucleic acid encoding same.

[0865] In one example, reference to a protein or nucleic acid shall be taken to be reference to an olfactory receptor, family 1, subfamily C, member 1 protein or nucleic acid encoding same.

[0866] In one example, reference to a protein or nucleic acid shall be taken to be reference to a transmembrane and tetratricopeptide repeat containing 4 protein or nucleic acid encoding same.

[0867] In one example, reference to a protein or nucleic acid shall be taken to be reference to a chloride channel 4 protein or nucleic acid encoding same.

[0868] In one example, reference to a protein or nucleic acid shall be taken to be reference to a olfactory receptor, family 12, subfamily D, member 3 protein or nucleic acid encoding same.

[0869] In one example, reference to a protein or nucleic acid shall be taken to be reference to a butyrophilin-like protein 8 precursor protein or nucleic acid encoding same.

[0870] In one example, reference to a protein or nucleic acid shall be taken to be reference to a solute carrier, family 7 member 14 protein or nucleic acid encoding same.

[0871] In one example, reference to a protein or nucleic acid shall be taken to be reference to an olfactory receptor, family 7 subfamily D member 4 protein or nucleic acid encoding same.

[0872] In one example, reference to a protein or nucleic acid shall be taken to be reference to a mucin 12, cell surface associated protein or nucleic acid encoding same.

[0873] In one example, reference to a protein or nucleic acid shall be taken to be reference to a T-cell receptor gamma chain C region PT-gamma-1/2 protein or nucleic acid encoding same.

[0874] In one example, reference to a protein or nucleic acid shall be taken to be reference to a Defensin beta 109 protein or nucleic acid encoding same.

[0875] In one example, reference to a protein or nucleic acid shall be taken to be reference to a Kv channel interacting protein 1 (variant 1) protein or nucleic acid encoding same.

[0876] In one example, reference to a protein or nucleic acid shall be taken to be reference to a solute carrier family 45, member 4 protein or nucleic acid encoding same.

[0877] In one example, reference to a protein or nucleic acid shall be taken to be reference to an ectonucleotide pyrophosphatase/phosphodiesterase 6 protein or nucleic acid encoding same.

[0878] In one example, reference to a protein or nucleic acid shall be taken to be reference to a protocadherin beta 8 protein or nucleic acid encoding same.

[0879] In one example, reference to a protein or nucleic acid shall be taken to be reference to an olfactory receptor, family 2, sub family T, member 3 protein or nucleic acid encoding same.

[0880] In one example, reference to a protein or nucleic acid shall be taken to be reference to an olfactory receptor family 5, subfamily M, member 10 protein or nucleic acid encoding same.

[0881] In one example, reference to a protein or nucleic acid shall be taken to be reference to an olfactory receptor family 4, subfamily S, member 1 protein or nucleic acid encoding same.

[0882] In one example, reference to a protein or nucleic acid shall be taken to be reference to a G protein-coupled receptor 83 protein or nucleic acid encoding same.

[0883] In one example, reference to a protein or nucleic acid shall be taken to be reference to a taste receptor, type 2, member 19 protein or nucleic acid encoding same.

[0884] In one example, reference to a protein or nucleic acid shall be taken to be reference to a Kallmann syndrome 1 protein or nucleic acid encoding same.

[0885] In one example, reference to a protein or nucleic acid shall be taken to be reference to a solute carrier organic anion transporter family, member 1B3 protein or nucleic acid encoding same.

[0886] In one example, reference to a protein or nucleic acid shall be taken to be reference to a 7 transmembrane receptor (rhodopsin family) olfactory receptor like protein or a 60S acidic ribosomal protein P2 (RPLP2) or nucleic acid encoding same.

[0887] In one example, reference to a protein or nucleic acid shall be taken to be reference to a major histocompatability complex, class II, DQ beta 1 protein or nucleic acid encoding same.

[0888] In one example, reference to a protein or nucleic acid shall be taken to be reference to a CD166 (ALCAM) activated leukocyte cell adhesion molecule protein or nucleic acid encoding same.

[0889] In one example, reference to a protein or nucleic acid shall be taken to be reference to an IL-20Rbeta-Interleukin 20 receptor beta protein or nucleic acid encoding same.

[0890] In one example, reference to a protein or nucleic acid shall be taken to be reference to a podoplanin-differentiation factor; O-glycosylated protein or nucleic acid encoding same.

[0891] In one example, reference to a protein or nucleic acid shall be taken to be reference to a cholinergic receptor, muscarinic 3 protein or nucleic acid encoding same.

[0892] In one example, reference to a protein or nucleic acid shall be taken to be reference to an intergrin, beta 1 (fibronectin receptor, beta polypeptide, antigen CD29 includes MDF2, MSK12) protein or nucleic acid encoding same.

[0893] In one example, reference to a protein or nucleic acid shall be taken to be reference to a sialic acid binding Ig-like lectin 8, CD329 protein or nucleic acid encoding same.

[0894] In one example, reference to a protein or nucleic acid shall be taken to be reference to a RAS-related protein RAP 1A protein or nucleic acid encoding same.

[0895] In one example, reference to a protein or nucleic acid shall be taken to be reference to a Plexin A2 protein or nucleic acid encoding same.

[0896] In one example, reference to a protein or nucleic acid shall be taken to be reference to a CD158b (KIR2DL3) killer cell immunoglobulin-like receptor, 2 domains, ligand 3 protein or nucleic acid encoding same.

[0897] In one example, reference to a protein or nucleic acid shall be taken to be reference to a CD314, killer cell lectin-like receptor, subfamily K, member 1 protein or nucleic acid encoding same.

[0898] In one example, reference to a protein or nucleic acid shall be taken to be reference to a chemokine (C—X3-C) receptor 1, CCRL1 protein or nucleic acid encoding same.

[0899] In one example, reference to a protein or nucleic acid shall be taken to be reference to a G protein-coupled receptor 174 protein or nucleic acid encoding same.

[0900] In one example, reference to a protein or nucleic acid shall be taken to be reference to a disintegrin and metalloproteinase domain-containing protein 10 (ADAM10) protein or nucleic acid encoding same.

[0901] In one example, reference to a protein or nucleic acid shall be taken to be reference to a signal-regulatory protein beta 1 (SIRPB1) protein or nucleic acid encoding same.

[0902] In one example, reference to a protein or nucleic acid shall be taken to be reference to a GM-CSF receptor subunit alpha precursor (CSF2RA) protein or nucleic acid encoding same.

[0903] In one example, reference to a protein or nucleic acid shall be taken to be reference to a Ecotropic viral integration 5 (EVI5) protein or nucleic acid encoding same.

[0904] In one example, reference to a protein or nucleic acid shall be taken to be reference to a lysyl oxidase-like 4 (LOXL4) protein or nucleic acid encoding same. In one example, reference to a protein or nucleic acid shall be taken to be reference to a Leucine rich containing 33 (LRRC33) protein or nucleic acid encoding same.

[0905] In one example of the present disclosure, a marker set forth in any one or more of Tables 1-6 is expressed on an EPC (i.e., are positive for expression) or is expressed at a high or “hi” level on an EPC.

[0906] As used herein, the term “positive expression” or “+” shall be taken to mean expression above the level of background, e.g., as detected using an isotype control compound, e.g., antibody.

[0907] As used herein, the term “isotype control compound” shall be taken to mean a compound, e.g., an antibody of the same isotype as the compound (such as an antibody) used to detect expression of a protein, however having no relevant specificity to a protein and conjugated to the same detectable moiety as the compound used to detect expression of the protein. Such a control aids in distinguishing non-specific “background” binding from specific binding.

[0908] Reference to a “high” or “hi” level of expression the 50% of cells, such as 40%, 30% or for example 20%, such as 10% of cells expressing the highest level of the recited marker in a population of cells, e.g., as determined using FACS analysis.

[0909] The present disclosure also encompasses any combination of nucleic acids or proteins set forth in any one or more of Tables 1-6. For example, any example of the disclosure described herein shall be taken to apply mutatis mutandis to any two or more nucleic acids and/or proteins individually or collectively set forth in any one or more of Tables 1-6. Similarly, the present disclosure shall be taken to encompass detection of any combination of protein and nucleic acid markers individually or collectively set forth in any one or more of Tables 1-6.

[0910] Any example of the disclosure or example herein shall be taken to also apply to any nucleic acid or protein recited in the exemplified subject matter.

[0911] By “individually” is meant that the disclosure encompasses the recited nucleic acids or proteins or groups nucleic acids and/or proteins separately, and that, notwithstanding that individual nucleic acid(s) and/or protein(s) or groups of nucleic acids and/or proteins may not be separately listed herein, the accompanying claims may define such nucleic acid(s) and/or protein(s) or groups of nucleic acids and/or proteins separately and divisibly from each other.

[0912] By “collectively” is meant that the disclosure encompasses any number or combination of the recited nucleic acids and/or proteins or groups of nucleic acids and/or proteins, and that, notwithstanding that such numbers or combinations of nucleic acid(s) and/or proteins(s) or groups of nucleic acids and/or proteins may not be specifically listed herein, the accompanying claims may define such combinations or sub-combinations separately and divisibly from any other combination of nucleic acid(s) and/or protein(s) or groups of nucleic acids and/or proteins.

[0913] The present disclosure also contemplates detection of any individual or collection of proteins or nucleic acids described herein according to any example of the disclosure together with any other marker, e.g., of an EPC. Exemplary additional proteins or nucleic acids are described herein.

[0914] In another example, a method for detecting or isolating EPCs additionally comprises detecting a low or undetectable level of expression of a nucleic acid or protein expressed by a non-EPC. Exemplary nucleic acids and/or proteins include CD144, vWF, eNOS and/or Tie2.

### Detection/Isolation/Diagnostic/Therapeutic Compounds

[0915] The present disclosure encompasses a variety of reagents useful in detecting/isolating EPCs and/or diagnosing/prognosing/treating/preventing EPC-associated conditions. Compounds include antibodies, polypeptides comprising an antigen binding domain of an antibody, peptides, nucleic acid-based reagents, and small molecules. Any compound for treating a subject can be tested in vitro and/or in vivo using models of EPC activity and/or EPC-associated disease, e.g., as described herein.

### Protein Compounds

### Antibodies

[0916] For example, a method as described herein according to any example of the disclosure detects a protein and/or isolates a population enriched for EPCs using an antibody and/or polypeptide comprising an antigen binding domain of an antibody and/or involves administering an antibody or polypeptide comprising an antigen binding domain thereof.

[0917] As used herein, the term “antibody” refers to an immunoglobulin molecule capable of binding to a target protein and/or an epitope thereof and/or an immunogenic fragment thereof and/or a modified form thereof (e.g., glycosylated, etc.) through at least one antigen binding site, located in the variable region of the immunoglobulin molecule. This term encompasses not only intact polyclonal or monoclonal antibodies, but also variants, fusion polypeptides comprising an antibody, humanized antibodies, human antibodies and chimeric antibodies. This term also encompasses derivatives comprising the antibodies, e.g., conjugates comprising an additional component, e.g., a toxin and/or a compound that increases the stability of an antibody.

[0918] As used herein, the term “polypeptide comprising an antigen binding domain” shall be taken to mean any fragment or domain or polypeptide comprising same of an antibody that retains the ability to bind to the target protein specifically or selectively. This term also includes a polypeptide comprising a plurality of antigen binding domains from one or more antibody(ies). The polypeptide may form a component of a multimeric protein (e.g., in the case of Fab fragment or a diabody or higher order multimer). This term includes a Fab fragment, a Fab′ fragment, a F(ab′) fragment, a single chain antibody (SCA or SCAB or scFv), a diabody or higher order multimer amongst others. An “Fab fragment” consists of a monovalent antigen-binding fragment of an antibody molecule, and can be produced by digestion of a whole antibody molecule with the enzyme papain, to yield a fragment consisting of an intact light chain and a portion of a heavy chain. Such fragments can also be produced using recombinant means. An “Fab′ fragment” of an antibody molecule can be obtained by treating a whole antibody molecule with pepsin, followed by reduction, to yield a molecule consisting of an intact light chain and a portion of a heavy chain. Two Fab′ fragments are obtained per antibody molecule treated in this manner. Such fragments can also be produced using recombinant means. An “F(ab′)2 fragment” of an antibody consists of a dimer of two Fab′ fragments held together by two disulfide bonds, and is obtained by treating a whole antibody molecule with the enzyme pepsin, without subsequent reduction. Such fragments can also be produced using recombinant means. A “single chain antibody” (SCA) or “scFv” (single chain Fv, or single chain fragment variable) is a genetically engineered single chain molecule containing the variable region of a light chain and the variable region of a heavy chain, linked by a suitable, flexible polypeptide linker. The term “polypeptide comprising an antigen binding domain of an antibody” encompasses domain antibodies (dAbs) comprising a single variable domain, a heavy chain only antibody (e.g., from camelid or cartilaginous fish) or a minibody or a flex minibody or a diabody or a triabody or a tetrabody or a higher order multimer or any protein discussed above fused to a constant region of an antibody or a Fc region of an antibody or a C_{H}2 and/or C_{H}3 region of an antibody.

[0919] For some proteins described herein antibodies can be obtained from commercial sources, as will be apparent to the skilled artisan. For example, antibodies against ALCAM are commercially available from Abcam Ltd; antibodies against SPAG11B are commercially available from Santa Cruz Biotechnology, Inc; antibodies against FRAS1 are commercially available from Santa Cruz Biotechnology, Inc; antibodies against IL20RB are commercially available from Santa Cruz Biotechnology, Inc; antibodies against ILDR1 are commercially available from Abnova; antibodies against EPB41L1 are commercially available from Abcam Ltd; antibodies against BAGE are commercially available from Santa Cruz Biotechnology, Inc; antibodies against CHRM3 are commercially available from Santa Cruz Biotechnology, Inc; antibodies against GRIA2 are commercially available from Abcam Ltd; antibodies against SYT15 are commercially available from Santa Cruz Biotechnology, Inc; antibodies against NLGN1 are commercially available from Abnova; antibodies against ITGB1 are commercially available from Becton Dickinson Inc; antibodies against SIGLEC8 are commercially available from Abnova; antibodies against UNC93A are commercially available from Santa Cruz Biotechnology, Inc; antibodies against OR1C1 are commercially available from Santa Cruz Biotechnology, Inc; antibodies against RAP 1A are commercially available from Abnova; antibodies against PLXNA2 are commercially available from Abnova; antibodies against TMTC4 are commercially available from Santa Cruz Biotechnology, Inc; antibodies against CLCN4 are commercially available from Abnova; antibodies against OR12D3 are commercially available from Santa Cruz Biotechnology, Inc; antibodies against BTNL8 are commercially available from Santa Cruz Biotechnology, Inc; antibodies against KIR2DL3 are commercially available from Becton Dickinson Inc; antibodies against SLC7A14 are commercially available from Abcam; antibodies against GPR18 are commercially available from Santa Cruz Biotechnology, Inc; antibodies against OR7D4 are commercially available from Santa Cruz Biotechnology, Inc; antibodies against KLRK1 are commercially available from Becton Dickinson Inc; antibodies against MUC12 are commercially available from Santa Cruz Biotechnology, Inc; antibodies against CX3CR1 are commercially available from Abnova; antibodies against DEFB109 are commercially available from Santa Cruz Biotechnology, Inc; antibodies against KCNIP1 are commercially available from Abnova; antibodies against SLC45A4 are commercially available from Santa Cruz Biotechnology, Inc; antibodies against ENPP6 are commercially available from Abcam; antibodies against PCDHB8 are commercially available from Santa Cruz Biotechnology, Inc; antibodies against EMR2 are commercially available from Abcam; antibodies against SLCO1B3 are commercially available from Abcam; antibodies against HLA_DQB1 are commercially available from Abnova; antibodies against GPR83 are commercially available from Santa Cruz Biotechnology, Inc; antibodies against TAS2R19 are commercially available from Abcam; antibodies against KAL1 are commercially available from Abcam; anti-GPR174 antibodies are available from Genway Biotech Inc; antibodies against EPGN are available from Sigma Aldrich or Abcam; antibodies against ALC15A2 are available from Abcam; EMB antibodies are available from Abcam; and AREG antibodies are available from Abnova; ITM2A antibodies are available from Sigma Aldrich; NRG4 antibodies are available from Abcam; antibodies against SLC16A6 are available from Sigma Aldrich; antibodies; antibodies against SLC39A8 are available from Santa Cruz Biotechnology; antibodies against GPM6B are commercially available from Sigma Aldrich; antibodies against SIGLEC10 are commercially available from Abcam; antibodies against CNR2 are commercially available from Genway Biotech Inc; antibodies against RHBDD1 are commercially available from Sigma Aldrich; antibodies against PRSS21 are commercially available from Abcam; antibodies against SIGLEC6 are commercially available from Abgent; antibodies against SORL1 are commercially available from Prosci Incorporated; antibodies against NCKAP1L are commercially available from Abcam; antibodies against EVI2B are commercially available from Novus Biologicals; antibodies against KCNQS are commercially available from KCNQS; antibodies against PLXNC1 are commercially available from Santa Cruz Biotechnology; antibodies against P2RY14 are available from Novus Biologicals; antibodies against SLC8A1 are commercially available from Abnova; antibodies against HTR1F are commercially available from Sigma Aldrich; antibodies against TRAT1 are commercially available from Lifespan Biosciences; antibodies against GPR183 are commercially available from Abnova; antibodies against OR13D1 are commercially available from Abcam; antibodies against VSIG4 are commercially available from Sino Biologicals; antibodies against TAS2R4 are commercially available from Abcam; antibodies against GPR18 are commercially available from Genway Biologicals Inc; antibodies against EMR2 are commercially available from Novus Biologicals; antibodies against TAS2R3 are commercially available from Abcam; antibodies against TAS2R13 are commercially available from Abcam; antibodies against MR1 are commercially available from Abcam; antibodies against SLC22A16 are commercially available from Abcam; antibodies against GPR34 are commercially available from Novus Biologicals; antibodies against NKG7 are commercially available from Santa Cruz Biotechnology; antibodies against SLC24 are commercially available from Lifespan Biosciences; antibodies against GPR65 are commercially available from Abcam; antibodies against SLC2A5 are commercially available from Sigma Aldrich; antibodies against KCNAB2 are commercially available from Antibodies Online; antibodies against OPN3 are commercially available from Abcam; antibodies against KCNE3 are commercially available from Santa Cruz Biotechnology; antibodies against LAT2 are commercially available from Abcam; antibodies against ABCC4 are commercially available from Sigma Aldrich; antibodies against OR52B6 are commercially available from Santa Cruz Biotechnology; antibodies against ADCY7 are commercially available from Abcam; antibodies against MLC1 are commercially available from Genway Biologicals; antibodies against ENPP5 are commercially available from Abcam; antibodies against SLC38A1 are commercially available from Genway Biologicals; antibodies against DSG2 are commercially available from R&D Systems; antibodies against CD302 are commercially available from Santa Cruz Biotechnology; antibodies against SLC1A3 are commercially available from Novus Biologicals; antibodies against TBXAS1 are commercially available from Acris Antibodies; antibodies against SEMA3C are commercially available from Santa Cruz Biotechnology; antibodies against LAPTM5 are commercially available from Novus Biologicals; antibodies against VAMP8 are commercially available from Abcam; antibodies against SLC1A4 are commercially available from Novus Biologicals; antibodies against AKAP7 are commercially available from Abcam; antibodies against CLDN20 are commercially available from Sigma Aldrich; antibodies against CLDN10 are commercially available from Acris Antibodies; antibodies against ADAMTS2 are commercially available from Abcam; antibodies against PLBD1 are commercially available from Acris Antibodies; antibodies against IQCB1 are commercially available from Novus Biologicals; antibodies against MFAP4 are commercially available from Abcam; antibodies against FBN2 are commercially available from Sigma Aldrich; antibodies against OGN are commercially available from Santa Cruz Biotechnology; antibodies against OMD are commercially available from R&D Systems; antibodies against ASPN are commercially available from Everest Biotech; antibodies against PZP are commercially available from Santa Cruz Biotechnology; antibodies against HSN2 are commercially available from Novus Biologicals; antibodies against FAM46C are commercially available from Abcam; antibodies against SERPINI2 are commercially available from Novus Biologicals; antibodies against Erlin-1 are commercially available from Abcam; and antibodies against LOXL3 are commercially available from Santa Cruz Biotechnology.

[0920] To generate antibodies, a protein or immunogenic fragment or epitope thereof or a cell expressing and displaying same, optionally formulated with any suitable or desired carrier, adjuvant, or pharmaceutically acceptable excipient, is conveniently administered in the form of an injectable composition. Injection may be intranasal, intramuscular, sub-cutaneous, intravenous, intradermal, intraperitoneal, or by other known route. For treatment of eye conditions, administration can be intraocular, or intravitreal. For intravenous injection, it is desirable to include one or more fluid and nutrient replenishers. Means for preparing and characterizing antibodies are known in the art. (See, e.g., ANTIBODIES: A LABORATORY MANUAL, Cold Spring Harbor Laboratory, 1988, incorporated herein by reference).

[0921] Immunogenic peptides for generating polyclonal or monoclonal antibodies can be covalently coupled to an immunogenic carrier protein, such as diphtheria toxoid (DT), Keyhole Limpet Hemocyanin (KLH), tetanus toxoid (TT) or the nuclear protein of influenza virus (NP), using one of several conjugation chemistries known in the art. This enhances the immunogenicity of peptides that are otherwise not highly immunogenic in animals e.g., mice, rats, rabbits, chickens etc. Methods of preparing and/or carrier proteins are known in the art and described, for example, in U.S. Pat. Nos. 4,709,017, 5,843,711, 5,601,827, and 5,917,017).

[0922] The conjugate molecules so produced may be purified and employed in immunogenic compositions to elicit, upon administration to a host, an immune response to the protein and/or peptide which is potentiated in comparison to the protein or peptide alone.

[0923] The efficacy of the protein or immunogenic fragment or epitope thereof or cell expressing same in producing an antibody is established by injecting an animal, for example, a mouse, chicken, rat, rabbit, guinea pig, dog, horse, cow, goat or pig, with a formulation comprising the protein or immunogenic fragment or epitope thereof, and then monitoring the immune response to the protein, epitope or fragment. Both primary and secondary immune responses are monitored. The antibody titer is determined using any conventional immunoassay, such as, for example, ELISA, or radio-immunoassay.

[0924] The production of polyclonal antibodies may be monitored by sampling blood of the immunized animal at various points following immunization. A second, booster injection, may be given, if required to achieve a desired antibody titer. The process of boosting and titering is repeated until a suitable titer is achieved. When a desired level of immunogenicity is obtained, the immunized animal is bled and the serum isolated and stored, and/or the animal is used to generate monoclonal antibodies (Mabs).

[0925] Monoclonal antibodies (mAbs) are exemplary antibodies useful in performance of the invention. The term “monoclonal antibody” or “mAb” refers to a homogeneous antibody population capable of binding to the same antigen(s) such as, to the same epitopic determinant within the antigen(s). This term is not intended to be limited as regards to the source of the antibody or the manner in which it is made.

[0926] For the production of mAbs any one of a number of known techniques may be used, such as, for example, the procedure exemplified in U.S. Pat. No. 4,196,265 or ANTIBODIES: A LABORATORY MANUAL, Cold Spring Harbor Laboratory, 1988, incorporated herein by reference.

[0927] For example, a suitable animal is immunized with an effective amount of the protein or immunogenic fragment or epitope thereof or cell expressing same under conditions sufficient to stimulate antibody producing cells. Rodents such as rabbits, mice and rats are exemplary animals, however, the use of sheep or frog cells is also possible. The use of rats may provide certain advantages, but mice or rabbits are useful, with the BALB/c or C57BL/6 mouse being a routinely used animal and one that generally gives a higher percentage of stable fusions. Alternatively, a mouse genetically-engineered to express human immunoglobulin proteins, and, for example, not express murine immunoglobulin proteins, is immunized to produce an antibody of the present disclosure. Such mice are known in the art and commercially available. For example, Regeneron, Inc. have produced the VelocImmune™ mouse in which human variable regions have been homologously recombined or knocked-in to the mouse genome to replace endogenous mouse variable region encoding genes. Such mice are described, for example, in WO2002/066630. Abgenix/Amgen, Inc. and Kirin Brewery/Medarex, Inc. have produced strains of mice in which the endogenous mouse immunoglobulin loci are inactivated or “knocked-out” and human immunoglobulin loci introduced using yeast artificial chromosomes. Examples of these mice are described or reviewed in Lonberg et al. (1994); Lonberg, (1994); Tomizuka et al. (2000) and Jakobovits et al. (2007).

[0928] Following immunization, somatic cells with the potential for producing antibodies, specifically B lymphocytes (B cells), are selected for use in the mAb generating protocol. These cells may be obtained from biopsies of spleens, tonsils or lymph nodes, or from a peripheral blood sample. Spleen cells and peripheral blood cells are exemplary, the former because they are a rich source of antibody-producing cells that are in the dividing plasmablast stage, and the latter because peripheral blood is easily accessible. Spleen lymphocytes are obtained by homogenizing the spleen with a syringe. The B cells from the immunized animal are then fused with cells of an immortal myeloma cell, generally derived from the same species as the animal that was immunized with the immunogen. Any one of a number of myeloma cells may be used and these are known to those of skill in the art (e.g. murine P3-X63/Ag8, X63-Ag8.653, NS1/1 .Ag 4 1, Sp2/0-Ag14, FO, NSO/U, MPC-I 1, MPC11—X45-GTG 1.7 and S194/5XX0).

[0929] To generate hybrids of antibody-producing spleen or lymph node cells and myeloma cells, somatic cells are mixed with myeloma cells in the presence of an agent or agents (chemical or electrical) that promote the fusion of cell membranes. Fusion methods using Sendai virus have been described by Kohler and Milstein, (1975); and Kohler and Milstein, (1976). Methods using polyethylene glycol (PEG), such as 37% (v/v) PEG, are described in detail by Gefter et al, (1977). The use of electrically induced fusion methods is also appropriate.

[0930] Hybrids are amplified by culture in a selective medium comprising an agent that blocks the de novo synthesis of nucleotides in the tissue culture media. Exemplary agents are aminopterin, methotrexate and azaserine.

[0931] The amplified hybridomas are subjected to a functional selection for antibody specificity and/or titer, such as, for example, by immunoassay (e.g. radioimmunoassay, enzyme immunoassay, cytotoxicity assay, plaque assay, dot immunoassay, and the like).

[0932] The selected hybridomas are serially diluted and cloned into individual antibody-producing cell lines, which clones can then be propagated for an extended period to provide mAbs. The cell lines may be exploited for mAb production in at least two basic ways. A sample of the hybridoma is injected, usually in the peritoneal cavity, into a histocompatible animal of the type that was used to provide the somatic and myeloma cells for the original fusion. The injected animal develops tumors secreting the specific monoclonal antibody produced by the fused cell hybrid. The body fluids of the animal, such as serum or ascites fluid, can then be tapped to provide mAbs in high concentration. The individual cell lines could also be cultured in vitro, where the mAbs are naturally secreted into the culture medium from which they are readily obtained in high concentrations. MAbs produced by either means may be further purified, if desired, using filtration, centrifugation and various chromatographic methods such as HPLC or affinity chromatography.

[0933] Alternatively, ABL-MYC technology (NeoClone, Madison Wis. 53713, USA) is used to produce cell lines secreting monoclonal antibodies (mAbs) against a protein as described herein according to any example of the disclosure or an epitope or immunogenic fragment thereof. This technology comprises infecting splenocytes from immunized mice with replication-incompetent retrovirus comprising the oncogenes v-abl and c-myc. Splenocytes are transplanted into naive mice which then develop ascites fluid containing cell lines producing monoclonal antibodies (mAbs) against a protein as described herein according to any example of the disclosure or an epitope or immunogenic fragment thereof. The mAbs are purified from ascites using protein G or protein A, e.g., bound to a solid matrix, depending on the isotype of the mAb. The ABL-MYC technology is described generically in detail in Largaespada (1990); and Largaespada et al, (1996).

[0934] Antibodies can also be produced or isolated by screening a display library, e.g., a phage display library where, for example the phage express scFv fragments on the surface of their coat with a large variety of CDRs. For example, U.S. Pat. No. 6,521,404, U.S. Pat. No. 5,969,108 and U.S. Pat. No. 7,049,135 describe the isolation of murine and/or human antibodies, using phage libraries. Subsequent publications describe the production of high affinity (nM range) human antibodies by chain shuffling (Marks et al, 1992), as well as combinatorial infection and in vivo recombination as a strategy for constructing very large phage libraries (Waterhouse et al, 1993).

### Recombinant Antibody Production

[0935] The antibodies or proteins of the present disclosure can also be produced recombinantly, using techniques and materials readily obtainable.

[0936] For example, DNA encoding an antibody of the disclosure or a polypeptide comprising an antigen binding domain of an antibody, e.g., a Fab fragment is readily isolated and sequenced using conventional procedures (e.g., by using oligonucleotide probes that are capable of binding specifically to genes encoding the heavy and light chains of murine antibodies). A hybridoma cell serves as a source of such DNA. Once isolated, the DNA may be placed into expression vectors, which are then transfected into host cells such as E. coli cells, simian COS cells, Chinese Hamster Ovary (CHO) cells, or myeloma cells that do not otherwise produce antibody protein, to obtain the synthesis of monoclonal antibodies in the recombinant host cells. Review articles on recombinant expression in bacteria of DNA encoding the antibody include Skerra et al, (1993) and Pluckthun, (1992). Molecular cloning techniques to achieve these ends are known in the art and described, for example in Ausubel et al. (1988) or Sambrook et al. (1989). A wide variety of cloning and in vitro amplification methods are suitable for the construction of recombinant nucleic acids. Examples of these techniques and instructions sufficient to direct persons of skill through many cloning exercises are found in Berger and Kimmel; Sambrook et al., (1989); and Ausubel et al., eds., (1988). Methods of producing recombinant immunoglobulins are also known in the art. See U.S. Pat. No. 6,331,415; and U.S. Pat. No. 5,585,089.

[0937] For recombinant production of an antibody or protein, the nucleic acid encoding it is isolated and inserted into a replicable vector for further cloning (amplification of the DNA) or for expression. DNA encoding the antibody is readily isolated or synthesized using conventional procedures (e.g., by using oligonucleotide probes that are capable of binding specifically to DNAs encoding the heavy and light chains of the antibody). Many vectors are available. Exemplary vectors are described herein. The vector components generally include, but are not limited to, one or more of the following: a signal sequence, a sequence encoding an antibody or protein of the present disclosure (e.g., derived from the information provided herein), an enhancer element, a promoter, and a transcription termination sequence. The skilled artisan will be aware of suitable sequences for expression of an antibody. For example, exemplary signal sequences include prokaryotic secretion signals (e.g., alkaline phosphatase, penicillinase, Ipp, or heat-stable enterotoxin II), yeast secretion signals (e.g., invertase leader, a factor leader, or acid phosphatase leader) or mammalian secretion signals (e.g., herpes simplex gD signal or an immunoglobulin signal). Exemplary promoters include those active in prokaryotes (e.g., phoA promoter, β-lactamase and lactose promoter systems, alkaline phosphatase, a tryptophan (trp) promoter system, and hybrid promoters such as the tac promoter), and those active in mammalian cells (e.g., cytomegalovirus immediate early promoter (CMV), the human elongation factor 1-α promoter (EF1), the small nuclear RNA promoters (U1a and U1b), α-myosin heavy chain promoter, Simian virus 40 promoter (SV40), Rous sarcoma virus promoter (RSV), Adenovirus major late promoter, β-actin promoter; hybrid regulatory element comprising a CMV enhancer/β-actin promoter or an immunoglobulin promoter or active fragment thereof.).

[0938] Suitable host cells for cloning or expressing the DNA in the vectors herein are the prokaryotic, yeast, or higher eukaryotic cells described above. Suitable prokaryotes for this purpose include eubacteria, such as Gram-negative or Gram-positive organisms, for example, Enterobacteriaceae such as Escherichia, e.g., E. coli, Enterobacter, Erwinia, Klebsiella, Proteus, Salmonella, e.g., Salmonella typhimurium, Serratia, e.g., Serratia marcescans, and Shigella, as well as Bacilli such as B. subtilis and B. licheniformis, Pseudomonas such as P. aeruginosa, and Streptomyces. One E. coli cloning host is E. coli 294 (ATCC 31,446), although other strains such as E. coli B, E. coli X 1776 (ATCC 31,537), and E. coli W3110 (ATCC 27,325) are suitable. These examples are illustrative rather than limiting.

[0939] In addition to prokaryotes, eukaryotic microbes such as filamentous fungi or yeast are suitable cloning or expression hosts for antibody-encoding vectors. Saccharomyces cerevisiae, or common baker's yeast, is the most commonly used among lower eukaryotic host microorganisms. However, a number of other genera, species, and strains are commonly available and useful herein, such as Schizosaccharomyces pombe; Pichia pastoris (EP 183,070); and filamentous fungi such as, e.g., Neurospora, Penicillium, Tolypocladium, and Aspergillus hosts such as A. nidulans and A. niger.

[0940] Suitable host cells for the expression of glycosylated antibody are derived from multicellular organisms. Examples of invertebrate cells include plant and insect cells. Numerous baculoviral strains and variants and corresponding permissive insect host cells from hosts such as Spodoptera frugiperda (caterpillar), Aedes aegypti (mosquito), Aedes albopictus (mosquito), Drosophila melanogaster (fruitfly), and Bombyx mori have been identified.

[0941] Examples of useful mammalian host cell lines are monkey kidney CV1 line transformed by SV40 (COS-7, ATCC CRL 1651); human embryonic kidney line (293 or 293 cells subcloned for growth in suspension culture, Graham et al. (1977); baby hamster kidney cells (BHK, ATCC CCL 10); Chinese hamster ovary cells (CHO); mouse Sertoli cells (TM4); monkey kidney cells (CV1 ATCC CCL 70); African green monkey kidney cells (VERO-76, ATCC CRL-1587); human cervical carcinoma cells (HELA, ATCC CCL 2); canine kidney cells (MDCK, ATCC CCL 34); buffalo rat liver cells (BRL 3A, ATCC CRL 1442); human lung cells (W138, ATCC CCL 75); human liver cells (Hep G2, HB 8065); mouse mammary tumor (MMT 060562, ATCC CCL51); TR1 cells (Mather et al. (1982); MRC 5 cells; FS4 cells; and PER.C6™ (Crucell NV).

[0942] The host cells used to produce the antibody of this disclosure may be cultured in a variety of media. Commercially available media such as Ham's F10 (Sigma), Minimal Essential Medium ((MEM), (Sigma), RPM1-1640 (Sigma), and Dulbecco's Modified Eagle's Medium ((DMEM), Sigma) are suitable for culturing the host cells. In addition, any of the media described in Ham et al. (1979), Barnes et al. (1980), U.S. Pat. No. 4,767,704; U.S. Pat. No. 4,657,866; U.S. Pat. No. 4,927,762; U.S. Pat. No. 4,560,655; U.S. Pat. No. 5,122,469; WO90/03430; WO87/00195; may be used as culture media for the host cells.

### Chimeric Antibodies

[0943] In one example an antibody of the disclosure is a chimeric antibody. The term “‘chimeric antibody” refers to antibodies in which a portion of the heavy and/or light chain is identical with or homologous to corresponding sequences in antibodies derived from a particular species (e.g., murine, such as mouse) or belonging to a particular antibody class or subclass, while the remainder of the chain(s) is identical with or homologous to corresponding sequences in antibodies derived from another species (e.g., primate, such as human) or belonging to another antibody class or subclass, as well as fragments of such antibodies, so long as they exhibit the desired biological activity (U.S. Pat. No. 4,816,397, U.S. Pat. No. 4,816,567; and U.S. Pat. No. 5,807,715).

[0944] Typically chimeric antibodies utilize rodent or rabbit variable regions and human constant regions, in order to produce an antibody with predominantly human domains. For example, a chimeric antibody comprises a variable region from a mouse antibody as described herein according to any example of the disclosure fused to a human constant region. The production of such chimeric antibodies is known in the art, and may be achieved by standard means (as described, e.g., U.S. Pat. No. 4,816,397, U.S. Pat. No. 4,816,567; and U.S. Pat. No. 5,807,715).

[0945] As used herein, “antibody variable domain” refers to the portions of the light and heavy chains of antibody molecules that include amino acid sequences of complementarity determining regions (CDRs; i.e., CDR1, CDR2, and CDR3), and Framework Regions (FRs). V_{H} refers to the variable domain of the heavy chain. V_{L} refers to the variable domain of the light chain. CDRs and FRs may be defined according to Kabat (1987 and 1991)) or Chothia and Lesk (1987) or any other known technique or combination thereof.

[0946] The term constant region (CR) as used herein, refers to the portion of the antibody molecule which confers effector functions. The heavy chain constant region can be selected from any of the five isotypes: alpha, delta, epsilon, gamma or mu. Further, heavy chains of various subclasses (such as the IgG subclasses of heavy chains) are responsible for different effector functions and thus, by choosing the desired heavy chain constant region, antibodies with desired effector function can be produced. Exemplary heavy chain constant regions are gamma 1 (IgG1), gamma 2 (IgG2), gamma 3 (IgG3) and gamma 4 (IgG4). Light chain constant regions can be of the kappa or lambda type, such as of the kappa type.

[0947] As used herein, the term “complementarity determining regions” (syn. CDRs; i.e., CDR1, CDR2, and CDR3) refers to the amino acid residues of an antibody variable domain the presence of which are necessary for antigen binding. Each variable domain typically has three CDR regions identified as CDR1, CDR2 and CDR3. Each complementarity determining region may comprise amino acid residues from a “complementarity determining region” as defined by Kabat et al. (1987 and 1991) and/or those residues from a “hypervariable loop” Chothia and Lesk (1987) or any other known technique or combination thereof.

[0948] “Framework regions” (hereinafter FR) are those variable domain residues other than the CDR residues.

### Humanized and Human Antibodies

[0949] The antibodies of the present disclosure may be humanized antibodies or human antibodies.

[0950] The term “humanized antibody” shall be understood to refer to a chimeric molecule, generally prepared using recombinant techniques, having an epitope binding site derived from an antibody from a non-human species and the remaining antibody structure of the molecule based upon the structure and/or sequence of a human antibody. The antigen-binding site comprises the complementarity determining regions (CDRs) from the non-human antibody grafted onto appropriate framework regions in the variable domains of a human antibody and the remaining regions from a human antibody. Antigen binding sites may be wild type or modified by one or more amino acid substitutions. Humanized forms of non-human (e.g., murine) antibodies are chimeric antibodies, antibody chains or polypeptides comprising antigen binding domains thereof (such as Fv, Fab, Fab′, F(ab)₂ or other antigen-binding subsequences of antibodies) which contain minimal sequence derived from non-human antibody. In some instances, Fv framework residues of the human antibody are replaced by corresponding non-human residues. Humanized antibodies may also comprise residues which are found neither in the recipient antibody nor in the imported CDR or framework sequences. In general, the humanized antibody will comprise substantially all of at least one, and typically two, variable domains, in which all or substantially all of the CDR regions correspond to those of a non-human antibody and all or substantially all of the FR regions are those of a human antibody consensus sequence. The humanized antibody optimally also will comprise at least a portion of an antibody constant region (Fc), typically that of a human antibody.

[0951] Methods for humanizing non-human antibodies are known in the art. Humanization can be essentially performed following the method of U.S. Pat. No. 6,548,640, U.S. Pat. No. 5,585,089, U.S. Pat. No. 6,054,297 or U.S. Pat. No. 5,859,205. Other methods for humanizing an antibody are not excluded.

[0952] The term “human antibody” as used herein in connection with antibody molecules and binding proteins refers to antibodies having variable (e.g. V_{H}, V_{L}, CDR and FR regions) and constant antibody regions derived from or corresponding to sequences found in humans, e.g. in the human germline or somatic cells. The “human” antibodies can include amino acid residues not encoded by human sequences, e.g. mutations introduced by random or site directed mutations in vitro (in particular mutations which involve conservative substitutions or mutations in a small number of residues of the antibody, e.g. in 1, 2, 3, 4 or 5 of the residues of the antibody, e.g. in 1, 2, 3, 4 or 5 of the residues making up one or more of the CDRs of the antibody). These “human antibodies” do not actually need to be produced by a human, rather, they can be produced using recombinant means and/or isolated from a transgenic animal (e.g., mouse) comprising nucleic acid encoding human antibody constant and/or variable regions (e.g., as described above).

[0953] Human antibodies can also be produced using various techniques known in the art, including phage display libraries (e.g., as described in U.S. Pat. No. 5,885,793).

[0954] Completely human antibodies which recognize a selected epitope can also be generated using a technique referred to as “guided selection.” In this approach a selected non-human monoclonal antibody, e.g., a mouse antibody, is used to guide the selection of a completely human antibody recognizing the same epitope (U.S. Pat. No. 5,565,332).

### Multi-Specific Antibodies

[0955] Bispecific antibodies are antibodies that have binding specificities for at least two different epitopes. Exemplary bispecific antibodies may bind to two different epitopes of the target protein. Other such antibodies may combine a binding site for a protein described herein with a binding site for another protein. Alternatively, a region that binds a protein described herein may be combined with a region which binds to a triggering molecule on a leukocyte such as a T-cell receptor molecule (e.g., CD3), or Fc receptors for IgG (FcγR), such as FcγRI (CD64), FcγRII (CD32) and/or FcγRIII (CD16), so as to focus and localize cellular defense mechanisms to an EPC. Bispecific antibodies may also be used to localize cytotoxic agents to EPCs. These antibodies possess a target protein-binding region and a region which binds the cytotoxic agent (e.g., saporin, anti-interferon-α, vinca alkaloid, ricin A chain, methotrexate or radioactive isotope hapten). Bispecific antibodies can be prepared as full length antibodies or proteins comprising antigen binding domains of antibodies (e.g., F(ab′)2 bispecific antibodies). Exemplary bispecific antibodies and their method for production are described in WO96/16673, WO98/02463 and U.S. Pat. No. 5,821,337.

[0956] Methods for making bispecific antibodies are known in the art. Traditional production of full length bispecific antibodies is based on the co-expression of two immunoglobulin heavy chain-light chain pairs, where the two chains have different specificities (Millstein et al, 1983). Because of the random assortment of immunoglobulin heavy and light chains, these hybridomas (quadromas) produce a potential mixture of 10 different antibody molecules, of which only one has the correct bispecific structure. Purification of the correct molecule is usually done by affinity chromatography steps. Similar procedures are disclosed in WO93/08829, and in Traunecker et al. (1991). Other approaches for producing bispecific antibodies are known in the art and described for example, in WO94/04690; U.S. Pat. No. 5,731,168; Suresh et al, (1986).

[0957] Bispecific antibodies include cross-linked or “heteroconjugate” antibodies. For example, one of the antibodies in the heteroconjugate can be coupled to avidin, the other to biotin. Such antibodies are known in the art and described, for example, in U.S. Pat. No. 4,676,980; WO91/00360; and WO92/200373.

[0958] Bispecific antibodies can also be prepared using chemical linkage (Brennan et al, 1985) or using Fab′-SH fragments from E. coli, which can be chemically coupled to form bispecific antibodies (Shalaby et al, 1992). Other techniques make use of leucine zippers (Kostelny et al, 1992) or the “diabody” technology described by Hollinger et al, (1993).

[0959] Antibodies with more than two valencies are also contemplated by the present disclosure. For example, trispecific antibodies can be prepared (Tutt et al, (1991).

[0960] The antibodies of the present disclosure can be multivalent antibodies (which are other than of the IgM class) with three or more antigen binding sites (e.g., tetravalent antibodies), which can be readily produced by recombinant expression of nucleic acid encoding the polypeptide chains of the antibody. The multivalent antibody can comprise a dimerization domain and three or more antigen binding sites. The dimerization domain comprises (or consists of) an Fc region or a hinge region of an antibody. In this scenario, the antibody can comprise an Fc region and three or more antigen binding sites amino-terminal to the Fc region.

### Mutations to Antibodies

[0961] Amino acid sequence modification(s) of the antibodies described herein are encompassed by the present disclosure. For example, it may be desirable to improve the binding affinity and/or other biological properties of the antibody. Amino acid sequence variants of the antibody are prepared by introducing appropriate nucleotide changes into the encoding nucleic acid, or by peptide synthesis. Such modifications include, for example, deletions from, and/or insertions into and/or substitutions of, residues within the amino acid sequences of the antibody. Any combination of deletion, insertion, and substitution is made to arrive at the final construct, provided that the final construct possesses the desired characteristics. The amino acid changes also may alter post-translational processes of the antibody, such as changing the number or position of glycosylation sites.

[0962] Amino acid sequence insertions include amino- and/or carboxyl-terminal fusions ranging in length from one residue to polypeptides containing one hundred or more residues, as well as intrasequence insertions of single or multiple amino acid residues. Examples of terminal insertions include an antibody with an N-terminal methionyl residue or the antibody fused to a cytotoxic polypeptide. Other insertional variants of the antibody include the fusion to the N- or C-terminus of the antibody to an enzyme or a polypeptide which increases the serum half-life of the antibody.

[0963] Another type of variant is an amino acid substitution variant. These variants have at least one amino acid residue in the antibody replaced by a different residue. The sites of interest for substitutional mutagenesis include the CDRs, however FR alterations are also contemplated. Exemplary substitutions are conservative substitutions.

[0964] Any cysteine residue not involved in maintaining the proper conformation of the antibody also may be substituted, generally with serine, to improve the oxidative stability of the molecule and prevent aberrant crosslinking. Conversely, cysteine bond(s) may be added to the antibody to improve its stability (particularly where a polypeptide comprising an antigen binding domain is used, e.g., a protein comprising a Fv).

[0965] An exemplary type of substitutional variant involves substituting one or more CDR residues of a parent antibody (e.g., a humanized or human antibody). Generally, the resulting variant(s) selected for further development will have improved biological properties relative to the parent antibody from which they are generated. A convenient way for generating such substitutional variants involves affinity maturation using phage display e.g., as described in U.S. Pat. No. 5,223,409.

[0966] Another type of amino acid variant of the antibody alters the original glycosylation pattern of the antibody. By altering is meant deleting one or more carbohydrate moieties found in the antibody, and/or adding one or more glycosylation sites that are not present in the antibody. Modified glycoforms of antibodies may be useful for a variety of purposes, including but not limited to enhancing or reducing effector function and/or modifying half life of the antibody (see, for example, WO2007/010401). Such alterations may result in a decrease or increase of CIq binding and CDC or of FcγR binding and/or ADCC. Substitutions can, for example, be made in one or more of the amino acid residues of the heavy chain constant region thereby causing an alteration in an effector function while retaining the ability to bind to the antigen as compared with the modified antibody, e.g., as described in U.S. Pat. No. 5,624,821 and U.S. Pat. No. 5,648,260. Engineered glycoforms may be generated by any method known to one skilled in the art, for example by using engineered or variant expression strains, by co-expression with one or more enzymes, for example β(1,4)—N-acetylglucosaminyltransferase III (GnTIII), by expressing an antibody or protein in various organisms or cell lines from various organisms, or by modifying carbohydrate(s) after the antibody or protein has been expressed. Methods for generating engineered glycoforms are known in the art, and include but are not limited to those described in U.S. Pat. No. 6,602,684; U.S. Ser. No. 10/277,370; or U.S. Ser. No. 10/113,929.

[0967] Alternatively, or in addition, the antibodies or proteins can be expressed in a transfectoma which does not add the fucose unit normally attached to Asn at position 297 of the Fc region of an IgG (e.g., IgG1) in order to enhance the affinity of the Fc region for Fc-Receptors which, in turn, will result in an increased ADCC of the antibodies in the presence of NK cells, e.g., Shield et al. 2002.

[0968] To increase the serum half life of the antibody, one may incorporate a salvage receptor binding epitope into the antibody or polypeptide comprising an antigen binding domain of an antibody as described in U.S. Pat. No. 5,739,277, for example. As used herein, the term “salvage receptor binding epitope” refers to an epitope of the Fc region of an IgG molecule (e.g., IgG1, IgG2, IgG3, or IgG4) that is responsible for increasing the in vivo serum half-life of the IgG molecule, e.g., by binding to a neonatal Fc receptor (FcRn).

### Purification of Antibodies

[0969] When using recombinant techniques, the antibody can be produced intracellularly, in the periplasmic space, or directly secreted into the medium. If the antibody is produced intracellularly, as a first step, the particulate debris, either host cells or lysed fragments, is removed, for example, by centrifugation or ultrafiltration. Carter et al. (1992) describe a procedure for isolating antibodies which are secreted to the periplasmic space of E. coli. Briefly, cell paste is thawed in the presence of sodium acetate (pH 3.5), EDTA, and phenylmethylsulfonylfluoride (PMSF) over about 30 min. Cell debris can be removed by centrifugation. Where the antibody is secreted into the medium, supernatants from such expression systems are generally first concentrated using a commercially available protein concentration filter, for example, an Amicon or Millipore Pellicon ultrafiltration unit. A protease inhibitor such as PMSF may be included in any of the foregoing steps to inhibit proteolysis and antibiotics may be included to prevent the growth of adventitious contaminants.

[0970] The antibody prepared from the cells can be purified using, for example, hydroxyl apatite chromatography, gel electrophoresis, dialysis, and affinity chromatography, with affinity chromatography being an exemplary purification technique. The suitability of protein A as an affinity ligand depends on the species and isotype of any immunoglobulin Fc domain that is present in the antibody. Protein A can be used to purify antibodies that are based on human γ1, γ2, or γ4 heavy chains (Lindmark et al., 1983). Protein G is recommended for all mouse isotypes and for human γ3 (Guss et al., 1986). The matrix to which the affinity ligand is attached is most often agarose, but other matrices are available. Mechanically stable matrices such as controlled pore glass or poly(styrenedivinyl)benzene allow for faster flow rates and shorter processing times than can be achieved with agarose. Other techniques for protein purification such as fractionation on an ion-exchange column, ethanol precipitation, Reverse Phase HPLC, chromatography on silica, chromatography on heparin SEPHAROSE™ chromatography on an anion or cation exchange resin (such as a polyaspartic acid column), chromatofocusing, SDS-PAGE, and ammonium sulfate precipitation are also available depending on the antibody to be recovered.

[0971] Following any preliminary purification step(s), the mixture comprising the antibody of interest and contaminants may be subjected to low pH hydrophobic interaction chromatography.

### Antibody Derivatives

[0972] The present disclosure also provides derivatives of an antibody or protein as described herein according to any example of the disclosure, e.g., a conjugate (immunoconjugate) comprising an antibody or protein of the present disclosure conjugated to a distinct moiety, e.g., a therapeutic agent which is directly or indirectly bound to the antibody. Examples of other moieties include, but are not limited to, an enzyme, a fluorophosphore, a cytotoxin, a radioisotope (e.g., iodine-131, yttrium-90 or indium-111), an immunomodulatory agent, an anti-angiogenic agent, an anti-neovascularization and/or other vascularization agent, a toxin, an anti-proliferative agent, a pro-apoptotic agent, a chemotherapeutic agent and a therapeutic nucleic acid.

[0973] A cytotoxin includes any agent that is detrimental to (e.g., kills) cells. For a description of these classes of drugs which are known in the art, and their mechanisms of action, see Goodman et al. (1990). Additional techniques relevant to the preparation of antibody immunotoxins are provided in for instance U.S. Pat. No. 5,194,594. Exemplary toxins include diphtheria A chain, nonbinding active fragments of diphtheria toxin, exotoxin A chain (from Pseudomonas aeruginosa), ricin A chain, abrin A chain, modeccin A chain, alpha-sarcin, Aleurites fordii proteins, dianthin proteins, Phytolaca americana proteins (PAPI, PAPII, and PAP-S), momordica charantia inhibitor, curcin, crotin, sapaonaria officinalis inhibitor, gelonin, mitogellin, restrictocin, phenomycin, enomycin and the tricothecenes. See, for example, WO93/21232.

[0974] Suitable therapeutic agents for forming immunoconjugates of the present disclosure include taxol, cytochalasin B, gramicidin D, ethidium bromide, emetine, mitomycin, etoposide, tenoposide, vincristine, vinblastine, colchicin, doxorubicin, daunorubicin, dihydroxy anthracin dione, mitoxantrone, mithramycin, actinomycin D, 1-dehydrotestosterone, glucocorticoids, procaine, tetracaine, lidocaine, propranolol, and puromycin, antimetabolites (such as methotrexate, 6-mercaptopurine, 6-thioguanine, cytarabine, fludarabin, 5-fluorouracil, decarbazine, hydroxyurea, asparaginase, gemcitabine, cladribine), alkylating agents (such as mechlorethamine, thioepa, chlorambucil, melphalan, carmustine (BSNU), lomustine (CCNU), cyclophosphamide, busulfan, dibromomannitol, streptozotocin, dacarbazine (DTIC), procarbazine, mitomycin C, cisplatin and other platinum derivatives, such as carboplatin), antibiotics (such as dactinomycin (formerly actinomycin), bleomycin, daunorubicin (formerly daunomycin), doxorubicin, idarubicin, mithramycin, mitomycin, mitoxantrone, plicamycin, anthramycin (AMC)).

[0975] A variety of radionuclides are available for the production of radioconjugated antibodies. Examples include, but are not limited to, ²¹²Bi, ¹³¹I, ⁹⁰Y, and ¹⁸⁶Re.

[0976] In another example of the disclosure, the antibody may be conjugated to a “receptor” (such as streptavidin) for utilization in EPC pretargeting wherein the antibody-receptor conjugate is administered to the patient, followed by removal of unbound conjugate from the circulation using a clearing agent and then administration of a “ligand” (e.g., avidin) that is conjugated to a therapeutic agent (e.g., a radionucleotide).

[0977] The antibodies of the present disclosure can be further modified to contain additional nonproteinaceous moieties that are known in the art and readily available. For example, the moieties suitable for derivatization of the antibody are water soluble polymers. Non-limiting examples of water soluble polymers include, but are not limited to, polyethylene glycol (PEG), copolymers of ethylene glycol/propylene glycol, carboxymethylcellulose, dextran or polyvinyl alcohol.

### Peptides and Polypeptides

[0978] In another example of the disclosure, the compound that binds to a protein as described herein according to any example of the disclosure is a peptide. For example, the peptide is derived from a ligand of a cell surface marker or protein as described herein according to any example of the disclosure (e.g., from a ligand binding region of the protein or marker).

[0979] Alternatively, a ligand is a peptide isolated from a random peptide library. To identify a suitable ligand, a random peptide library is generated and screened as described in U.S. Pat. No. 5,733,731, U.S. Pat. No. 5,591,646 and U.S. Pat. No. 5,834,318. Generally, such libraries are generated from short random oligonucleotides that are expressed either in vitro or in vivo and displayed in such a way to facilitate screening of the library to identify a peptide that. is capable of specifically binding to a protein or peptide of interest. Methods of display include, phage display, retroviral display, bacterial surface display, bacterial flagellar display, bacterial spore display, yeast surface display, mammalian surface display, and methods of in vitro display including, mRNA display, ribosome display and covalent display.

[0980] A peptide that is capable of binding a protein or peptide of interest is identified by a number of methods known in the art, such as, for example, standard affinity purification methods as described, for example in Scopes, 1994) purification using FACS analysis as described in U.S. Pat. No. 645,563, or purification using biosensor technology as described in Gilligan et al, 2002.

[0981] Another polypeptide that reduces the activity of a protein set forth in any one or more of Tables 1-6 is a soluble form of the protein. For example, one or more extracellular domains of the protein is(are) fused to a Fc region of an antibody. Such a polypeptide binds to a ligand of a protein set forth in any one or more of Tables 1-6 and reduces or prevents the ligand's ability to bind to induce activity of the protein. Methods for producing Fc fusion proteins are known in the art and described, for example, in WO92/12994 and U.S. Pat. No. 6,710,169.

### Small Molecules

[0982] A chemical small molecule library is also clearly contemplated for the identification of ligands that specifically bind to a protein or cell surface marker as described herein according to any example of the disclosure. Chemical small molecule libraries are available commercially or alternatively may be generated using methods known in the art, such as, for example, those described in U.S. Pat. No. 5,463,564.

### Nucleic Acid Detection/Therapeutic Reagents

### Probe/Primer Design and Production

[0983] As will be apparent to the skilled artisan, the specific probe or primer used in an assay of the present disclosure will depend upon the assay format used. Clearly, a probe or primer that is capable of specifically hybridizing to or detecting the marker of interest is useful. Methods for designing probes and/or primers for, for example, PCR or hybridization are known in the art and described, for example, in Dieffenbach and Dveksler (1995). Furthermore, several software packages are publicly available that design optimal probes and/or primers for a variety of assays, e.g. Primer 3 available from the Center for Genome Research, Cambridge, Mass., USA. Probes and/or primers useful for detection of a marker associated with EPCs are assessed to determine those that do not form hairpins, self-prime or form primer dimers (e.g. with another probe or primer used in a detection assay).

[0984] Furthermore, a probe or primer (or the sequence thereof) is assessed to determine the temperature at which it denatures from a target nucleic acid (i.e. the melting temperature of the probe or primer, or Tm). Methods of determining Tm are known in the art and described, for example, in Santa Lucia (1995) or Bresslauer et al. (1986).

[0985] Methods for producing/synthesizing a probe or primer of the present disclosure are known in the art. For example, oligonucleotide synthesis is described, in Gait (1984). For example, a probe or primer may be obtained by biological synthesis (e.g. by digestion of a nucleic acid with a restriction endonuclease) or by chemical synthesis. For short sequences (up to about 100 nucleotides) chemical synthesis is desirable.

[0986] For longer sequences standard replication methods employed in molecular biology are useful, such as, for example, the use of M13 for single stranded DNA as described by Messing (1983).

[0987] Other methods for oligonucleotide synthesis include, for example, phosphotriester and phosphodiester methods (Narang, et al., 1979) and synthesis on a support (Beaucage, et al, 1981) as well as phosphoramidate technique, Caruthers, et al. (1988), and others described in Narang (1987), and the references contained therein.

[0988] LNA synthesis is described, for example, in Nielsen et al, (1997); Singh and Wengel, (1998). PNA synthesis is described, for example, in Egholm et al. (1992); Egholm et al. (1993); and Orum et al. (1993).

[0989] In one example of the disclosure, a probe or primer useful for performance of the method of the disclosure comprises a nucleotide sequence comprising at least about 20 consecutive nucleotides of a nucleic set forth in any one of Tables 1-6.

[0990] The present disclosure additionally contemplates the use of a probe or primer produced according to the methods described herein in the manufacture of a diagnostic or prognostic reagent for diagnosing or determining a predisposition to or diagnosing or prognosing an EPC-associated condition.

Inhibition of Nucleic Acid Transcription/Translation In one example of the disclosure, therapeutic and/or prophylactic methods as described herein according to any example of the disclosure involve reducing expression of any one or more nucleic acids set forth in any one or more of Tables 1-6. For example, such a method involves administering a compound that reduces transcription and/or translation of any one or more nucleic acids set forth in any one or more of Tables 1-6. In one example, the compound is a nucleic acid, e.g., an antisense polynucleotide, a ribozyme, a PNA, an interfering RNA, a siRNA, a microRNA

### Antisense Nucleic Acids

[0991] The term “antisense nucleic acid” shall be taken to mean a DNA or RNA or derivative thereof (e.g., LNA or PNA), or combination thereof that is complementary to at least a portion of a specific mRNA molecule encoding a polypeptide as described herein in any example of the disclosure and capable of interfering with a post-transcriptional event such as mRNA translation. The use of antisense methods is known in the art (see for example, Hartmann and Endres, 1999).

[0992] An antisense nucleic acid of the disclosure will hybridize to a target nucleic acid under physiological conditions. Antisense nucleic acids include sequences that correspond to structural genes or coding regions or to sequences that effect control over gene expression or splicing. For example, the antisense nucleic acid may correspond to the targeted coding region of a nucleic acid set forth in any one or more of Tables 1-6, or the 5′-untranslated region (UTR) or the 3′-UTR or combination of these. It may be complementary in part to intron sequences, which may be spliced out during or after transcription, for example only to exon sequences of the target gene. The length of the antisense sequence should be at least 19 contiguous nucleotides, for example, at least 50 nucleotides, such as at least 100, 200, 500 or 1000 nucleotides of a nucleic acid set forth in any one or more of Tables 1-6 or a structural gene encoding same. The full-length sequence complementary to the entire gene transcript may be used. The length can be 100-2000 nucleotides. The degree of identity of the antisense sequence to the targeted transcript should be at least 90%, for example 95-100%.

### Catalytic Nucleic Acid

[0993] The term “catalytic nucleic acid” refers to a DNA molecule or DNA-containing molecule (also known in the art as a “deoxyribozyme” or “DNAzyme”) or a RNA or RNA-containing molecule (also known as a “ribozyme” or “RNAzyme”) which specifically recognizes a distinct substrate and catalyses the chemical modification of this substrate. The nucleic acid bases in the catalytic nucleic acid can be bases A, C, G, T (and U for RNA).

[0994] Typically, the catalytic nucleic acid contains an antisense sequence for specific recognition of a target nucleic acid, and a nucleic acid cleaving enzymatic activity (also referred to herein as the “catalytic domain”). The types of ribozymes that are particularly useful in this disclosure are a hammerhead ribozyme (Haseloff and Gerlach, 1988; Perriman et al. 1992) and a hairpin ribozyme (Zolotukiin et al., 1996; Klein et al., 1998; Shippy et al., 1999).

### RNA Interference

[0995] RNA interference (RNAi) is useful for specifically inhibiting the production of a particular protein. Although not wishing to be limited by theory, Waterhouse et al. (1998) have provided a model for the mechanism by which dsRNA (duplex RNA) can be used to reduce protein production. This technology relies on the presence of dsRNA molecules that contain a sequence that is essentially identical to the mRNA of the gene of interest or part thereof, in this case an mRNA encoding a protein set forth in any one or more of Tables 1-6. Conveniently, the dsRNA can be produced from a single promoter in a recombinant vector host cell, where the sense and anti-sense sequences are flanked by an unrelated sequence which enables the sense and anti-sense sequences to hybridize to form the dsRNA molecule with the unrelated sequence forming a loop structure. The design and production of suitable dsRNA molecules for the present disclosure is well within the capacity of a person skilled in the art, particularly considering WO99/32619, WO99/53050, WO99/49029, and WO01/34815.

[0996] The length of the sense and antisense sequences that hybridize should each be at least 19 contiguous nucleotides, such as at least 30 or 50 nucleotides, for example at least 100, 200, 500 or 1000 nucleotides. The full-length sequence corresponding to the entire gene transcript may be used. The lengths can be 100-2000 nucleotides. The degree of identity of the sense and antisense sequences to the targeted transcript should be at least 85%, for example, at least 90% such as, 95-100%.

[0997] Exemplary small interfering RNA (“siRNA”) molecules comprise a nucleotide sequence that is identical to about 19-21 contiguous nucleotides of the target mRNA. For example, the siRNA sequence commences with the dinucleotide AA, comprises a GC-content of about 30-70% (for example, 30-60%, such as 40-60% for example about 45%-55%), and does not have a high percentage identity to any nucleotide sequence other than the target in the genome of the mammal in which it is to be introduced, for example as determined by standard BLAST search.

### Detectably Labeled Compounds

[0998] In one example, a compound as described herein according to any example of the disclosure comprises one or more detectable markers to facilitate detection and/or isolation. For example, the compound comprises a fluorescent label such as, for example, fluorescein (FITC), 5,6-carboxymethyl fluorescein, Texas red, nitrobenz-2-oxa-1,3-diazol-4-yl (NBD), coumarin, dansyl chloride, rhodamine, 4′-6-diamidino-2-phenylinodole (DAPI), and the cyanine dyes Cy3, Cy3.5, Cy5, Cy5.5 and Cy7, fluorescein (5-carboxyfluorescein-N-hydroxysuccinimide ester), rhodamine (5,6-tetramethyl rhodamine). The absorption and emission maxima, respectively, for some of these fluorescent compounds are: FITC (490 nm; 520 nm), Cy3 (554 nm; 568 nm), Cy3.5 (581 nm; 588 nm), Cy5 (652 nm: 672 nm), Cy5.5 (682 nm; 703 nm) and Cy7 (755 nm; 778 nm).

[0999] Alternatively, or in addition, the compound that binds to a protein or cell surface marker as described herein according to any example of the disclosure is labeled with, for example, a fluorescent semiconductor nanocrystal (as described, for example, in U.S. Pat. No. 6,306,610).

[1000] Alternatively, or in addition, the compound is labeled with, for example, a magnetic or paramagnetic compound, such as, iron, steel, nickel, cobalt, rare earth materials, neodymium-iron-boron, ferrous-chromium-cobalt, nickel-ferrous, cobalt-platinum, or strontium ferrite.

### Pharmaceutical Compositions

[1001] Compounds of the present disclosure suitable for treating or preventing an EPC-associated condition (syn. active ingredients) are useful for parenteral, topical, oral, or local administration, aerosol administration, or transdermal administration, for prophylactic or for therapeutic treatment. Accordingly, in some examples, the compositions comprise an effective amount of the compound or a therapeutically effective amount of the compound or a prophylactically effective amount of the compound.

[1002] As used herein, the term “effective amount” shall be taken to mean a sufficient quantity of a compound to bind to the target protein in vivo and to reduce or inhibit or prevent EPC activity in vivo, compared to the same level in a subject or cell, tissue or organ thereof prior to administration and/or compared to a subject or cell, tissue or organ thereof from a subject of the same species to which the compound has not been administered. For example, the term “effective amount” means a sufficient quantity of the compound to reduce, prevent, or ameliorate an EPC-associated condition and/or to kill EPCs in a subject. The skilled artisan will be aware that such an amount will vary depending on, for example, the specific compounds administered and/or the particular subject and/or the type or severity or level of disease. Accordingly, this term is not to be construed to limit the disclosure to a specific quantity, e.g., weight or amount of compound(s); rather the present disclosure encompasses any amount of the compound(s) sufficient to achieve the stated result in a subject.

[1003] As used herein, the term “therapeutically effective amount” shall be taken to mean a sufficient quantity of a compound to reduce or inhibit one or more symptoms of an EPC-associated condition to a level that is below that observed and accepted as clinically diagnostic or clinically characteristic of that disease. The skilled artisan will be aware that such an amount will vary depending on, for example, the specific compound(s) administered and/or the particular subject and/or the type or severity or level of disease. Accordingly, this term is not to be construed to limit the disclosure to a specific quantity, e.g., weight or amount of compound(s), rather the present disclosure encompasses any amount of the compound(s) sufficient to achieve the stated result in a subject.

[1004] As used herein, the term “prophylactically effective amount” shall be taken to mean a sufficient quantity of a compound to prevent or inhibit or delay the onset of one or more detectable symptoms of an EPC-associated condition. The skilled artisan will be aware that such an amount will vary depending on, for example, the specific compound(s) administered and/or the particular subject and/or the type or severity or level of disease and/or predisposition (genetic or otherwise) to the disease. Accordingly, this term is not to be construed to limit the disclosure to a specific quantity, e.g., weight or amount of compound(s), rather the present disclosure encompasses any amount of the compound(s) sufficient to achieve the stated result in a subject.

[1005] The pharmaceutical compositions can be administered in a variety of unit dosage forms depending upon the method of administration. For example, unit dosage forms suitable for oral administration include powder, tablets, pills, capsules and lozenges. It is recognized that the pharmaceutical compositions of this disclosure, when administered orally, must be protected from digestion. This is typically accomplished either by complexing the compound with a composition to render it resistant to acidic and enzymatic hydrolysis or by packaging the compound in an appropriately resistant carrier such as a liposome. Means of protecting proteins from digestion are known in the art.

[1006] The pharmaceutical compositions of this disclosure are particularly useful for parenteral administration, such as intravenous administration or administration into a body cavity or lumen of an organ or joint. The compositions for administration will commonly comprise a solution of the compound of the present disclosure dissolved in a pharmaceutically acceptable carrier, for example an aqueous carrier. A variety of aqueous carriers can be used, e.g., buffered saline and the like. The compositions may contain pharmaceutically acceptable auxiliary substances as required to approximate physiological conditions such as pH adjusting and buffering agents, toxicity adjusting agents and the like, for example, sodium acetate, sodium chloride, potassium chloride, calcium chloride, sodium lactate and the like. The concentration of compounds of the present disclosure in these formulations can vary widely, and will be selected primarily based on fluid volumes, viscosities, body weight and the like in accordance with the particular mode of administration selected and the patient's needs. Exemplary carriers include water, saline, Ringer's solution, dextrose solution, and 5% human serum albumin. Nonaqueous vehicles such as mixed oils and ethyl oleate may also be used. Liposomes may also be used as carriers. The vehicles may contain minor amounts of additives that enhance isotonicity and chemical stability, e.g., buffers and preservatives.

[1007] The compounds of the present disclosure can be formulated for parenteral administration, e.g., formulated for injection via the intravenous, intramuscular, sub-cutaneous, transdermal, or other such routes, including peristaltic administration and direct instillation into a tumor disease site (intracavity administration). The preparation of an aqueous composition that contains the compounds of the present disclosure as an active ingredient will be known to those of skill in the art.

[1008] Suitable pharmaceutical compositions in accordance with the disclosure will generally include an amount of the compounds of the present disclosure admixed with an acceptable pharmaceutical diluent or excipient, such as a sterile aqueous solution, to give a range of final concentrations, depending on the intended use. The techniques of preparation are generally known in the art as exemplified by Remington's Pharmaceutical Sciences, 16th Ed. Mack Publishing Company, 1980, incorporated herein by reference.

[1009] Upon formulation, compounds of the present disclosure will be administered in a manner compatible with the dosage formulation and in such amount as is therapeutically/prophylactically effective. Formulations are easily administered in a variety of dosage forms, such as the type of injectable solutions described above, but other pharmaceutically acceptable forms are also contemplated, e.g., tablets, pills, capsules or other solids for oral administration, suppositories, pessaries, nasal solutions or sprays, aerosols, inhalants, liposomal forms and the like. Pharmaceutical “slow release” capsules or compositions may also be used. Slow release formulations are generally designed to give a constant drug level over an extended period and may be used to deliver compounds of the present disclosure.

[1010] WO2002/080967 describes compositions and methods for administering aerosolized compositions comprising antibodies for the treatment of, e.g., asthma, which are also suitable for administration of an antibody of the present disclosure.

[1011] Suitable dosages of compounds of the present disclosure will vary depending on the specific compound, the condition to be treated and/or the subject being treated. It is within the ability of a skilled physician to determine a suitable dosage, e.g., by commencing with a sub-optimal dosage and incrementally modifying the dosage to determine an optimal or useful dosage. Alternatively, to determine an appropriate dosage for treatment/prophylaxis, data from the cell culture assays or animal studies are used, wherein a suitable dose is within a range of circulating concentrations that include the ED50 of the active compound with little or no toxicity. The dosage may vary within this range depending upon the dosage form employed and the route of administration utilized. A therapeutically/prophylactically effective dose can be estimated initially from cell culture assays. A dose may be formulated in animal models to achieve a circulating plasma concentration range that includes the IC50 (i.e., the concentration of the compound which achieves a half-maximal inhibition of symptoms) as determined in cell culture. Such information can be used to more accurately determine useful doses in humans. Levels in plasma may be measured, for example, by high performance liquid chromatography.

[1012] In one example, a composition of the present disclosure comprising a compound that inhibits or kills EPCs additionally comprises a chemotherapeutic agent. Such a composition is useful for treating a cancer, e.g., by inhibiting neovascularization and by killing or preventing proliferation of cancer cells. Exemplary chemotherapeutic agents are described, for example, in WO2006/0334488 and include alkylating agents such as thiotepa; alkyl sulfonates such as busulfan, improsulfan and piposulfan; aziridines such as benzodopa, carboquone, meturedopa, and uredopa; ethylenimines and methylamelamines including altretamine, triethylenemelamine, triethylenephosphoramide, triethylenethiophosphoramide and trimethylomelamine; acetogenins (especially bullatacin and bullatacinone); a camptothecin (including the synthetic analogue topotecan); bryostatin; callystatin; dolastatin; duocarmycin; eleutherobin; pancratistatin; a sarcodictyin; spongistatin; nitrogen mustards such as chlorambucil; nitrosureas such as carmustine; antibiotics such as the enediyne antibiotics; dynemicin, dactinomycin, daunorubicin, detorubicin, doxorubicin, epirubicin, mitomycins such as mitomycin C, peplomycin, potfiromycin, puromycin, streptozocin, zinostatin, zorubicin; anti-metabolites such as methotrexate and 5-fluorouracil (5-FU); folic acid analogues such as denopterin; purine analogs such as fludarabine; pyrimidine analogs such as ancitabine, azacitidine; androgens such as calusterone; hydroxyurea; maytansinoids such as maytansine; vindesine; and pharmaceutically acceptable salts, acids or derivatives of any of the above.

[1013] In another example, a composition of the disclosure additionally comprises an anti-inflammatory compound or is administered with an anti-inflammatory compound, e.g., celecoxib, diclofenac potassium, diclofenac sodium, etodolac, fenoprofen calcium, flurbiprofen, ibuprofen, indomethacin, indomethacin sodium trihydrate, ketoprofen, ketorolac tromethamine, nabumetone, naproxen, naproxen sodium, oxaprozin, piroxicam, rofecoxib, or sulindac.

[1014] In another example, a composition of the disclosure additionally comprises a methotrexate or is administered with methotrexate.

### Cellular Compositions

[1015] In one example of the present disclosure EPCs and/or progeny cells thereof are administered in the form of a composition. For example, such a composition comprises a pharmaceutically acceptable carrier and/or excipient.

[1016] Suitable carriers for this disclosure include those conventionally used, e.g., water, saline, aqueous dextrose, lactose, Ringer's solution, a buffered solution, hyaluronan and glycols are exemplary liquid carriers, particularly (when isotonic) for solutions. Suitable pharmaceutical carriers and excipients include starch, cellulose, glucose, lactose, sucrose, gelatin, malt, rice, flour, chalk, silica gel, magnesium stearate, sodium stearate, glycerol monostearate, sodium chloride, glycerol, propylene glycol, water, ethanol, and the like.

[1017] In another example, a carrier is a media composition, e.g., in which a cell is grown or suspended. For example, such a media composition does not induce any adverse effects in a subject to whom it is administered.

[1018] Exemplary carriers and excipients do not adversely affect the viability of a cell and/or the ability of a cell to reduce, prevent or delay an EPC-associated condition.

[1019] In one example, the carrier or excipient provides a buffering activity to maintain the cells at a suitable pH to thereby exert a biological activity, e.g., the carrier or excipient is phosphate buffered saline (PBS). PBS represents an attractive carrier or excipient because it interacts with cells minimally and permits rapid release of the cells, in such a case, the composition of the disclosure may be produced as a liquid for direct application to the blood stream or into a tissue or a region surrounding or adjacent to a tissue, e.g., by injection.

[1020] EPCs and/or progeny cells thereof can also be incorporated or embedded within scaffolds that are recipient-compatible and which degrade into products that are not harmful to the recipient. These scaffolds provide support and protection for cells that are to be transplanted into the recipient subjects. Natural and/or synthetic biodegradable scaffolds are examples of such scaffolds. Other suitable scaffolds include polyglycolic acid scaffolds, e.g., as described by Vacanti, et al. (1988); Cima, et al. (1991); Vacanti, et al. (1991); or synthetic polymers such as polyanhydrides, polyorthoesters, and polylactic acid.

[1021] For example, the composition comprises an effective amount or a therapeutically or prophylactically effective amount of cells. For example, the composition comprises about 1×10⁵ EPCs/kg to about 1×10⁹ EPCs/kg or about 1×10⁶ EPCs/kg to about 1×10⁸ EPCs/kg or about 1×10⁶ EPCs/kg to about 1×10⁷ EPCs/kg. The exact amount of cells to be administered is dependent upon a variety of factors, including the age, weight, and sex of the patient, and the extent and severity of the EPC-associated condition.

[1022] The cellular compositions of this disclosure can be administered to the subject by any recognized methods, either systemically or at a localized site. In one example, the most convenient time to administer the cells to improve grafting is during the time of surgery. To treat an autoimmune disease, the composition can be administered at the onset of symptoms and/or following onset of symptoms or even prior to the onset of symptoms (e.g., following detection of an autoimmune response). To keep the cells at the site until completion of the surgical procedure, it is convenient to administer the cells in a pharmaceutically compatible artificial gel, or in clotted plasma, by utilizing any other known controlled release mechanism (see above), or immobilized on a solid or semi-solid support. When less invasive procedures are desired, the composition can be injected at a desired location through a needle. For deeper sites, the needle can be positioned using endoscopic ultrasound techniques, radioscintigraphy, or some other imaging technique, alone or in combination with the use of an appropriate scope or cannula. For such applications, the cell population is conveniently administered when suspended in isotonic saline or a neutral buffer.

[1023] In one example, a cellular composition of the present disclosure is administered together with an agent that enhances endothelialization, such as, VEGF. The cells and the agent can be administered in the same composition and/or can be administered separately.

[1024] As discussed herein, EPCs and/or compositions that bind to EPCs can be immobilized on a solid or semi-solid matrix prior to administration to a subject. Such matrices are useful for, for example, forming vascular grafts that are endothelialized, thereby reducing the risk of thrombosis. Exemplary matrices will be apparent to the skilled artisan and include hydrogel materials, blends of hydrophilic and hydrophobic polymers such as polyethylene glycol (PEG) and d,l-polylactic acid (d,l-PLA), polyester and polytetrafluoroethyle.

### Isolation or Enrichment of Cells

[1025] One exemplary approach to enrich for the desired cells is magnetic bead cell sorting (MACS) or any other cell sorting method making use of magnetism, e.g., Dynabeads®. A conventional MACS procedure is described by Miltenyi et al. (1990). In this procedure, cells are labeled with magnetic beads bound to an antibody or other compound that binds to a cell surface marker or protein and the cells are passed through a paramagnetic separation column or exposed to another form of magnetic field. Cells that are magnetically labeled are trapped in the column; cells that are not pass through. The trapped cells are then eluted from the column.

[1026] The MACS technique is equally applicable to negative selection, e.g., removal of cells expressing an undesirable marker, i.e., undesirable cells. Such a method involves contacting a population of cells with a magnetic particle labeled with a compound that binds to a cell surface marker expressed at detectable levels on the undesirable cell type(s). Following incubation, samples are washed and resuspended and passed through a magnetic field to remove cells bound to the immunomagnetic beads. The remaining cells depleted of the undesirable cell type(s) are then collected.

[1027] In another example, a compound that binds to a protein or cell surface marker is immobilized on a solid surface and a population of cells is contacted thereto. Following washing to remove unbound cells, cells bound to the compound can be recovered, e.g., eluted, thereby isolating or enriching for cells expressing the protein to which the compound binds. Alternatively, cells that do not bind to the compound can be recovered if desired.

[1028] In a further example, cells are isolated or enriched using fluorescence activated cell sorting (FACS). FACS is a known method for separating particles, including cells, based on the fluorescent properties of the particles and described, for example, in Kamarch (1987). Generally, this method involves contacting a population of cells with compounds capable of binding to one or more proteins or cell surface markers, wherein compounds that bind to distinct markers are labeled with different fluorescent moieties, e.g., fluorophores. The cells are entrained in the center of a narrow, rapidly flowing stream of liquid. The flow is arranged so that there is a separation between cells relative to their diameter. A vibrating mechanism causes the stream of cells to break into individual droplets. The system is adjusted so that there is a low probability of more than one cell being in a droplet. Just before the stream breaks into droplets the flow passes through a fluorescence measuring station where the fluorescent character of interest of each cell is measured, e.g., whether or not a labeled compound is bound thereto. An electrical charging ring is placed at the point where the stream breaks into droplets. A charge is placed on the ring based on the immediately prior fluorescence intensity measurement and the opposite charge is trapped on the droplet as it breaks from the stream. The charged droplets then fall through an electrostatic deflection system that diverts droplets into containers based upon their charge, e.g., into one container if a labeled compound is bound to the cell and another container if not. In some systems the charge is applied directly to the stream and the droplet breaking off retains charge of the same sign as the stream. The stream is then returned to neutral after the droplet separates.

### Cell Culture

[1029] Following isolation, cells of the disclosure can be maintained under standard cell culture conditions. For example, the cells can be maintained in Dulbecco's Minimal Essential Medium (DMEM) or any other appropriate cell culture medium known in the art, e.g., as described above. Other appropriate media include, for example, MCDB, Minimal Essential Medium (MEM), IMDM, and RPMI. Additional suitable media for culturing EPCs include endothelial growth media, such as EGM-2 plus Bullet kit (available from Lonza Group Ltd).

[1030] Cell cultures can be incubated at about 37° C. in a humidified incubator. Cell culture conditions can vary considerably for the cells of the present disclosure. For example, the cells are maintained in an environment suitable for cell growth, e.g., comprising 5% O₂, 10% CO₂, 85% N₂ or comprising 10% CO₂ in air.

[1031] In some examples, cells are cultured on an extracellular matrix, e.g., fibronectin, laminin or EGM-2 and/or type IV collagen.

[1032] In some examples, cells are cultured in the presence of one or more growth factors, e.g., VEGF, insulin-like growth factor-1 and/or basic fibroblast growth factor. The cells may also be cultured in the presence of one or more vitamins and/or antioxidants, e.g., ascorbic acid.

[1033] In another example, the cells are cultured in suspension, i.e., without adhering to tissue culture plastic-ware or an extracellular matrix or components thereof. In this regard, the inventors have clearly exemplified culturing of EPCs in suspension culture.

### Detection Assays

### Protein Detection Assays

[1034] In one example, the method of the disclosure detects the presence of a protein. The amount, level or presence of a protein is determined using any of a variety of techniques known to the skilled artisan such as, for example, a technique selected from the group consisting of, immunohistochemistry, immunofluorescence, an immunoblot, a Western blot, a dot blot, an enzyme-linked immunosorbent assay (ELISA), radioimmunoassay (RIA), enzyme immunoassay, fluorescence resonance energy transfer (FRET), matrix-assisted laser desorption/ionization time-of-flight mass spectrometry (MALDI-tof-MS), electrospray ionization (ESI-MS) (including tandem mass spectrometry, e.g. LC-ESI-MS/MS and MALDI-tof/tof-MS), biosensor technology, evanescent fiber-optics technology or protein chip technology.

[1035] In one example the assay used to determine the amount or level of a protein is a semi-quantitative method.

[1036] In another example the assay used to determine the amount or level of a protein is a quantitative method.

[1037] For example, the protein is detected with an immunoassay, e.g., using an assay selected from the group consisting of, immunohistochemistry, immunofluorescence, ELISA, fluorescence-linked immunosorbent assay (FLISA) Western blotting, RIA, a biosensor assay, a protein chip assay and an immunostaining assay (e.g. immunofluorescence).

[1038] Standard solid-phase ELISA or FLISA formats are particularly useful in determining the concentration of a protein from a variety of samples.

[1039] In one form such an assay involves immobilizing a biological sample onto a solid matrix, such as, for example a polystyrene or polycarbonate microwell or dipstick, a membrane, or a glass support (e.g. a glass slide). A compound (e.g., an antibody) that specifically binds to a protein set out in any one of Tables 1-6 is brought into direct contact with the immobilized biological sample, and forms a direct bond with any of its target protein present in said sample. This antibody is generally labeled with a detectable reporter molecule, such as, for example, a fluorescent label (e.g. FITC or Texas Red) or a fluorescent semiconductor nanocrystal (as described in U.S. Pat. No. 6,306,610) in the case of a FLISA or an enzyme (e.g. horseradish peroxidase (HRP), alkaline phosphatase (AP) or β-galactosidase) in the case of an ELISA, or alternatively a second labeled antibody can be used that binds to the first antibody. Following washing to remove any unbound antibody the label is detected either directly, in the case of a fluorescent label, or through the addition of a substrate, such as for example hydrogen peroxide, TMB, or toluidine, or 5-bromo-4-chloro-3-indol-beta-D-galaotopyranoside (x-gal) in the case of an enzymatic label. Such ELISA- or FLISA-based systems are particularly suitable for quantification of the amount of a protein in a sample, by calibrating the detection system against known amounts of a protein standard to which the antibody binds, such as for example, an isolated and/or recombinant polypeptide or immunogenic fragment thereof or epitope thereof.

[1040] In another form, an ELISA or FLISA comprises of immobilizing a compound (e.g., an antibody) on a solid matrix, such as, for example, a membrane, a polystyrene or polycarbonate microwell, a polystyrene or polycarbonate dipstick or a glass support. A sample is then brought into physical relation with the compound, and the protein to which the compound binds is bound or ‘captured’. The bound protein is then detected using a second labeled compound that binds to a different protein or a different site in the same protein. Alternatively, a third labeled antibody can be used that binds the second (detecting) antibody.

[1041] It will be apparent to the skilled person that the assay formats described herein are amenable to high throughput formats, such as, for example, automation of screening processes or a microarray format as described in Mendoza et al. (1999). Furthermore, variations of the above-described assay will be apparent to those skilled in the art, such as, for example, a competitive ELISA.

[1042] In an alternative example, a polypeptide is detected within or on a cell, using methods known in the art, such as, for example, immunohistochemistry or immunofluorescence. Methods using immunofluorescence are exemplary, as they are quantitative or at least semi-quantitative. Methods of quantitating the degree of fluorescence of a stained cell are known in the art and described, for example, in Cuello (1984).

[1043] Biosensor devices generally employ an electrode surface in combination with current or impedance measuring elements to be integrated into a device in combination with the assay substrate (such as that described in U.S. Pat. No. 5,567,301). A compound that specifically binds to a protein or is incorporated onto the surface of a biosensor device and a biological sample contacted to said device. A change in the detected current or impedance by the biosensor device indicates protein binding to said antibody. Some forms of biosensors known in the art also rely on surface plasmon resonance to detect protein interactions, whereby a change in the surface plasmon resonance surface of reflection is indicative of a protein binding to a ligand or antibody (U.S. Pat. No. 5,485,277 and U.S. Pat. No. 5,492,840).

[1044] Biosensors are of particular use in high throughput analysis due to the ease of adapting such systems to micro- or nano-scales. Furthermore, such systems are conveniently adapted to incorporate several detection reagents, allowing for multiplexing of diagnostic reagents in a single biosensor unit. This permits the simultaneous detection of several proteins or peptides in a small amount of body fluids.

[1045] Evanescent biosensors are also useful as they do not require the pretreatment of a biological sample prior to detection of a protein of interest. An evanescent biosensor generally relies upon light of a predetermined wavelength interacting with a fluorescent molecule, such as for example, a fluorescent antibody attached near the probe's surface, to emit fluorescence at a different wavelength upon binding of the target polypeptide to the compound.

[1046] Micro- or nano-cantilever biosensors are also useful as they do not require the use of a detectable label. A cantilever biosensor utilizes a compound capable of specifically detecting the analyte of interest that is bound to the surface of a deflectable arm of a micro- or nano-cantilever. Upon binding of the analyte of interest (e.g. a marker within a polypeptide) the deflectable arm of the cantilever is deflected in a vertical direction (i.e. upwards or downwards). The change in the deflection of the deflectable arm is then detected by any of a variety of methods, such as, for example, atomic force microscopy, a change in oscillation of the deflectable arm or a change in pizoresistivity. Exemplary micro-cantilever sensors are described in US20030010097.

[1047] To produce protein chips, the proteins, peptides, polypeptides, antibodies or ligands that are able to bind specific antibodies or proteins of interest are bound to a solid support such as for example glass, polycarbonate, polytetrafluoroethylene, polystyrene, silicon oxide, metal or silicon nitride. This immobilization is either direct (e.g. by covalent linkage, such as, for example, Schiff's base formation, disulfide linkage, or amide or urea bond formation) or indirect. Methods of generating a protein chip are known in the art and are described in for example US20020136821, US20020192654, US20020102617 and U.S. Pat. No. 6,391,625. To bind a protein to a solid support it is often necessary to treat the solid support so as to create chemically reactive groups on the surface, such as, for example, with an aldehyde-containing silane reagent. Alternatively, an antibody or ligand may be captured on a microfabricated polyacrylamide gel pad and accelerated into the gel using microelectrophoresis as described in, Arenkov et al. (2000). In this regard, the present disclosure also provides a protein chip comprising a plurality of compounds capable of binding to at least two proteins set forth in any one or more of Tables 1-6. In one example, the compounds are antibodies or polypeptides comprising antigen binding domains thereof.

### Nucleic Acid Detection Assays

[1048] In another example, an EPC is detected and/or an EPC-associated condition is diagnosed/prognosed by detecting the level of expression of a nucleic acid. Exemplary assays for such detection include quantitative RT-PCR, NASBA, TMA or ligase-chain reaction.

[1049] Methods of RT-PCR are known in the art and described, for example, in Dieffenbach (ed) and Dveksler (ed) (1995).

[1050] Methods of TMA or self-sustained sequence replication (3SR) use two or more oligonucleotides that flank a target sequence, a RNA polymerase, RNase H and a reverse transcriptase. One oligonucleotide (that also comprises an RNA polymerase binding site) hybridizes to an RNA molecule that comprises the target sequence and the reverse transcriptase produces cDNA copy of this region. RNase H is used to digest the RNA in the RNA-DNA complex, and the second oligonucleotide used to produce a copy of the cDNA. The RNA polymerase is then used to produce a RNA copy of the cDNA, and the process repeated.

[1051] NASBA systems relies on the simultaneous activity of three enzymes (a reverse transcriptase, RNase H and RNA polymerase) to selectively amplify target mRNA sequences. The mRNA template is transcribed to cDNA by reverse transcription using an oligonucleotide that hybridizes to the target sequence and comprises a RNA polymerase binding site at its 5′ end. The template RNA is digested with RNase H and double-stranded DNA is synthesized. The RNA polymerase then produces multiple RNA copies of the cDNA and the process is repeated.

[1052] Clearly, the hybridization to and/or amplification of a nucleic acid using any of these methods is detectable using, for example, electrophoresis and/or mass spectrometry. In this regard, one or more of the probes/primers and/or one or more of the nucleotides used in an amplification reaction may be labeled with a detectable marker to facilitate rapid detection of a cellular marker, for example, a fluorescent label (e.g. Cy5 or Cy3) or a radioisotope (e.g. ³²P). Alternatively, amplification of a nucleic acid may be continuously monitored using a melting curve analysis method, such as that described in, for example, U.S. Pat. No. 6,174,670.

[1053] As exemplified herein, the present disclosure additionally contemplates microarray-based methods for detecting levels of expression of nucleic acids. Generally such methods involve the use of solid substrates having immobilized thereon a plurality of different oligonucleotides that specifically hybridize to nucleic acids, e.g., cDNA/cRNA of transcripts. A nucleic acid sample, e.g., cDNA/cRNA is labeled with a detectable marker. For example, two samples are prepared (e.g., from a population of EPCs and a population of non-EPCs, such as HUVECs) and each sample is labeled with a detectable marker. The samples are then mixed and contacted with the solid support under conditions sufficient to permit nucleic acid hybridization. Following a sufficient time to permit nucleic acid hybridization, the solid support is washed to remove non-hybridized nucleic acid and the level of the detectable marker hybridized to the oligonucleotides is determined so as to determine the level of expression of the transcript giving rise to each cDNA/cRNA. When two samples are hybridized to a solid support, the level of each detectable marker can be detected to determine the difference in the level of expression of each transcript (e.g., fold change in expression).

### Imaging Methods

[1054] As will be apparent to the skilled artisan from the foregoing, the present disclosure also contemplates imaging methods using a compound that binds to a protein of the disclosure. For imaging, a compound is generally conjugated to a detectable label, which can be any molecule or agent that can emit a signal that is detectable by imaging. However, a secondary labeled compound that specifically binds to a compound that binds to a protein of the disclosure may also be used. Exemplary detectable labels include a protein, a radioisotope, a fluorophore, a visible light emitting fluorophore, infrared light emitting fluorophore, a metal, a ferromagnetic substance, an electromagnetic emitting substance a substance with a specific magnetic resonance (MR) spectroscopic signature, an X-ray absorbing or reflecting substance, or a sound altering substance.

[1055] The compound that binds to a protein set forth in any one or more of Tables 1-6 (and, if used the labeled secondary compound) can be administered either systemically or locally to the tumor, organ, or tissue to be imaged, prior to the imaging procedure. Generally, the compound is administered in one or more doses effective to achieve the desired optical image of a tumor, tissue, or organ. Such doses may vary widely, depending upon the particular compound employed, condition to be imaged, tissue, or organ subjected to the imaging procedure, the imaging equipment being used, and the like.

[1056] In some examples of the disclosure, the compound is used as an in vivo optical imaging agent of tissues and organs in various biomedical applications including, but not limited to, imaging of tumors, tomographic imaging of organs, monitoring of organ functions, coronary angiography, fluorescence endoscopy, laser guided surgery, photoacoustic and sonofluorescence methods, and the like. Exemplary diseases in which a compound is useful for imaging are described herein and shall be taken to apply mutatis mutandis to the present example of the disclosure. In one example, the compounds of the disclosure are useful for the detection of the presence of tumors and other abnormalities (e.g., retinopathy and/or nephropathy) by monitoring where a particular protein of the disclosure is concentrated in a subject. In another example, the compound is useful for laser-assisted guided surgery.

[1057] Examples of imaging methods include magnetic resonance imaging (MRI), MR spectroscopy, radiography, computerized tomography (CT), ultrasound, planar gamma camera imaging, single-photon emission computed tomography (SPECT), positron emission tomography (PET), other nuclear medicine-based imaging, optical imaging using visible light, optical imaging using luciferase, optical imaging using a fluorophore, other optical imaging, imaging using near infrared light, or imaging using infrared light.

[1058] Certain examples of the methods of the present disclosure further include imaging a tissue during a surgical procedure on a subject.

[1059] A variety of techniques for imaging are known to those of ordinary skill in the art. Any of these techniques can be applied in the context of the imaging methods of the present disclosure to measure a signal from the detectable label. For example, optical imaging is one imaging modality that has gained widespread acceptance in particular areas of medicine. Examples include optical labeling of cellular components, and angiography such as fluorescein angiography and indocyanine green angiography. Examples of optical imaging agents include, for example, fluorescein, a fluorescein derivative, indocyanine green, Oregon green, a derivative of Oregon green, rhodamine green, a derivative of rhodamine green, an eosin, an erytlirosin, Texas red, a derivative of Texas red, malachite green, nanogold sulfosuccinimidyl ester, cascade blue, a coumarin derivative, a naphthalene, a pyridyloxazole derivative, cascade yellow dye, dapoxyl dye.

[1060] Gamma camera imaging is contemplated as a method of imaging that can be utilized for measuring a signal derived from the detectable label. One of skill in the art will be familiar with techniques for application of gamma camera imaging. In one example, measuring a signal can involve use of gamma-camera imaging of an ¹¹¹In or ^{99m}Tc conjugate, in particular ¹¹¹In-octreotide or ^{99m}Tc-somatostatin analogue.

[1061] CT is contemplated as an imaging modality in the context of the present disclosure. By taking a series of X-rays from various angles and then combining them with a computer, CT makes it possible to build up a three-dimensional image of any part of the body. A computer is programmed to display two-dimensional slices from any angle and at any depth. The slices may be combined to build three-dimensional representations.

[1062] In CT, intravenous injection of a radiopaque contrast agent conjugated to a compound, which binds to a protein identified herein can assist in the identification and delineation of soft tissue masses when initial CT scans are not diagnostic. Similarly, contrast agents aid in assessing the vascularity of a soft tissue lesion. For example, the use of contrast agents may aid the delineation of the relationship of a tumor and adjacent vascular structures.

[1063] CT contrast agents include, for example, iodinated contrast media. Examples of these agents include iothalamate, iohexyl, diatrizoate, iopamidol, ethiodol, and iopanoate. Gadolinium agents have also been reported to be of use as a CT contrast agent, for example, gadopentate.

[1064] MRI is an imaging modality that uses a high-strength magnet and radio-frequency signals to produce images. In MRI, the sample to be imaged is placed in a strong static magnetic field and excited with a pulse of radio frequency (RF) radiation to produce a net magnetization in the sample. Various magnetic field gradients and other RF pulses then act to code spatial information into the recorded signals. By collecting and analyzing these signals, it is possible to compute a three-dimensional image which, like a CT image, is normally displayed in two-dimensional slices. The slices may be combined to build three-dimensional representations.

[1065] Contrast agents used in MRI or MR spectroscopy imaging differ from those used in other imaging techniques. Examples of MRI contrast agents include gadolinium chelates, manganese chelates, chromium chelates, and iron particles. For example, a protein of the disclosure is conjugated to a compound comprising a chelate of a paramagnetic metal selected from the group consisting of scandium, titanium, vanadium, chromium, manganese, iron, cobalt, nickel, copper, molybdenum, ruthenium, cerium, indium, praseodymium, neodymium, promethium, samarium, europium, gadolinium, terbium, dysprosium, holmium, erbium, thulium, and ytterbium. A further example of imaging agents useful for the present disclosure is halocarbon-based nanoparticle such as PFOB or other fluorine-based MRI agents. Both CT and MRI provide anatomical information that aid in distinguishing tissue boundaries and vascular structure.

[1066] Imaging modalities that provide information pertaining to information at the cellular level, such as cellular viability, include PET and SPECT. In PET, a patient ingests or is injected with a radioactive substance that emits positrons, which can be monitored as the substance moves through the body.

[1067] SPECT is closely related to PET. The major difference between the two is that instead of a positron-emitting substance, SPECT uses a radioactive tracer that emits high-energy photons. SPECT is valuable for diagnosing multiple illnesses including coronary artery disease, and already some 2.5 million SPECT heart studies are done in the United States each year.

[1068] For PET, a protein of the disclosure is commonly labeled with positron-emitters such as ¹¹C, ¹³N, ¹⁵O, ¹⁸F, ⁸²Rb, and ⁶⁸Ga. Compounds that bind to a protein set forth in any one or more of Tables 1-6 are labeled with positron emitters such as ^{99m}Tc, ²⁰¹Tl, and ⁶⁷Ga, ¹¹¹In for SPECT.

[1069] Non-invasive fluorescence imaging of animals and humans can also provide in vivo diagnostic information and be used in a wide variety of clinical specialties. For instance, techniques have been developed over the years including simple observations following UV excitation of fluorophores up to sophisticated spectroscopic imaging using advanced equipment (see, e.g., Andersson-Engels et al, 1997). Specific devices or methods known in the art for the in vivo detection of fluorescence, e.g., from fluorophores or fluorescent proteins, include, but are not limited to, in vivo near-infrared fluorescence (see, e.g., Frangioni, 2003), the Maestro™ in vivo fluorescence imaging system (Cambridge Research & Instrumentation, Inc.; Woburn, Mass.), in vivo fluorescence imaging using a flying-spot scanner (see, e.g., Ramanujam et al, 2001), and the like.

[1070] Other methods or devices for detecting an optical response include, without limitation, visual inspection, CCD cameras, video cameras, photographic film, laser-scanning devices, fluorometers, photodiodes, quantum counters, epifluorescence microscopes, scanning microscopes, flow cytometers, fluorescence microplate readers, or signal amplification using photomultiplier tubes.

[1071] In some examples, an imaging agent is tested using an in vitro or in vivo assay prior to use in humans, e.g., using a model described herein.

### Samples

[1072] To the extent that the method of the present disclosure is performed in vitro, on an isolated tissue sample, rather than as an in vivo based screen, reference to “sample” should be understood as a reference to any sample of biological material derived from an animal such as, but not limited to, a body fluid (e.g., blood or synovial fluid or cerebrospinal fluid or bone marrow), cellular material (e.g. tissue aspirate), tissue biopsy specimens or surgical specimens. The term “sample” includes extracts and/or derivatives and/or fractions of said sample, e.g., serum, plasma, peripheral blood mononuclear cells (PBMC), a buffy coat fraction. For example, the sample comprises EPCs or is likely to comprise EPCs.

[1073] The sample which is used according to the method of the present disclosure may be used directly or may require some form of treatment prior to use. For example, a biopsy or surgical sample may require homogenization or other form of cellular dispersion prior to use. Furthermore, to the extent that the sample is not in liquid form, (if such form is required or desirable) it may require the addition of a reagent, such as a buffer, to mobilize the sample.

[1074] As will be apparent from the description and/or claims herein, such an assay may require the use of a suitable control, e.g. a normal or healthy individual or a typical population, e.g., for quantification.

[1075] As used herein, the term “normal individual” shall be taken to mean that the subject is selected on the basis that they do not have abnormal numbers of EPCs in a sample derived therefrom.

[1076] A “healthy subject” is one that has not been diagnosed as suffering from an EPC-associated condition and/or is not at risk of developing an EPC-associated condition.

[1077] Alternatively, or in addition, a suitable control sample is a control data set comprising measurements of the marker being assayed for a typical population of normal and/or healthy subjects, e.g., subjects known not to suffer from an EPC-associated condition.

[1078] In one example, a reference sample is not included in an assay. Instead, a suitable reference sample is derived from an established data set previously generated from a typical population. Data derived from processing, analyzing and/or assaying a test sample is then compared to data obtained for the sample population.

### Screening Assays

[1079] As discussed hereinabove, the present disclosure also provides methods for identifying or isolating a compound that binds to and/or modulate EPC activity. Suitable compounds for screening include, for example, antibodies, peptides or small molecules, e.g., as described herein according to any example.

[1080] In some examples, this method comprises determining an agent that binds to the recited protein. Such assays will be apparent to the skilled artisan. For example, the protein or a cell expressing same is immobilized on a solid surface and contacted with a labeled compound. Following washing to remove unbound compound the level of label is detected, which is indicative of the amount of bound compound.

[1081] In some examples, the method additionally comprises determining the effect of a compound on expression of a nucleic acid or protein. Suitable methods for determining expression levels are known in the art and/or described herein.

[1082] Assays for determining EPC function are also described herein and are to be taken to apply mutatis mutandis to the present example of the disclosure.

[1083] This disclosure also encompasses for the provision of information concerning the identified or isolated compound. Accordingly, the screening methods are further modified by:

(i) optionally, determining the structure of the compound; and
(ii) providing the compound or the name or structure of the compound such as, for example, in a paper form, machine-readable form, or computer-readable form.

[1084] Naturally, for compounds that are known, albeit not previously tested, for their function using a screen provided by the present disclosure, determination of the name and/or structure of the compound is implicit. This is because the skilled artisan will be aware of the name and/or structure of the compound at the time of performing the screen.

[1085] As used herein, the term “providing the compound” shall be taken to include any chemical or recombinant synthetic means for producing the compound or alternatively, the provision of a compound that has been previously synthesized by any person or means. This clearly includes isolating the compound.

[1086] In an example, the compound or the name or structure of the compound is provided with an indication as to its use e.g., as determined by a screen described herein.

[1087] The screening assays can be further modified by:

(i) optionally, determining the structure of the compound;
(ii) optionally, providing the name or structure of the compound such as, for example, in a paper form, machine-readable form, or computer-readable form; and
(iii) providing the compound.

[1088] In an example, the synthesized compound or the name or structure of the compound is provided with an indication as to its use e.g., as determined by a screen described herein.

[1089] In one example, the compound is provided in a library of compounds, each of which or a subset of which may be separated from other members (i.e., physically isolated). In such cases, a compound is isolated from the library by its identification, which then permits a skilled person to produce that compound in isolation, e.g., in the absence of other members of the library.

[1090] In some examples, the screening methods described herein comprise determining the effect of an isolated and/or identified compound on EPC activity and/or cell numbers (e.g., cell death. Such an assay may be performed in vitro and/or in vivo.

### In Vitro Assays of EPC Activity

[1091] An exemplary in vitro method for determining EPC activity is, for example, a CFU assay in which cells are cultured on an extracellular matrix and the ability to form clonal colonies is determined. For example, EPCs are cultured for several days, e.g., at least 2 or 3 or 4 or 5 or 6 or 7 days in a suitable culture medium and the number of cell colonies adhering to the chamber in which the cells are cultured are counted. Optionally, the chamber is coated with extracellular matrix or a component thereof. Functional EPCs will be capable of forming colonies, with each colony representing a CFU. When assessing the effect of a reduction in the amount of colonies (i.e., CFUs) in the presence of the compound compared to the number of colonies (CFUs) in the absence of the compound indicates that the compound inhibits or reduces EPC activity.

[1092] Another assays include, for example, migration assays, in which the ability of an EPC to migrate in vitro to an angiogenic compound, such as, VEGF. For example, a chamber comprising a porous membrane is coated with an extracellular matrix or component thereof and EPCs cultured in the chamber. The chamber is inserted into another chamber comprising an angiogenic factor, e.g., VEGF and the cells maintained for a time sufficient for the EPCs to migrate through the pores (e.g., 4-6 hours or 1-2 days). Cells having EPC activity migrate towards the angiogenic factor and are detectable in the chamber comprising the angiogenic factor. As will be apparent to the skilled person, a compound that reduces the number of cells detectable in the chamber comprising the angiogenic factor is considered to reduce EPC activity.

[1093] Other assays include those involving culturing cells and determining those capable of uptake of acetylated-LDL and/or that bind to Ulex europaeus I lectin. In such assays, cells are cultured in the presence of labeled acetylated LDL (e.g., 1,1′-dioctadecyl-3,3,3′,3-tetramethyl-indocarbocyanine perchlorate (Dil)-Ac-LDL) and/or Ulex europaeus lectin (e.g., labeled with a detectable compound). Cells that take up acetylated LDL and/or bind to Ulex europaeus lectin are considered to have EPC activity. For example, EPCs take up acetylated LDL and bind to Ulex europaeus lectin. A compound that inhibits or reduces EPC activity reduces uptake of acetylated LDL and/or binding of Ulex europaeus lectin.

[1094] A further method for assessing EPC function is a tube formation method. In such a method, cells are cultured in a tissue culture chamber, e.g., coated with extracellular matrix or a component thereof. Cells are cultured for a sufficient period to form tubes (e.g., 1-6 days) and the tissue culture chambers observed, using microscopy. Tubes are observed between two discrete cells or clusters thereof. Tube formation is indicative of EPC activity, and a compound that reduces tube formation is considered to inhibit or reduce EPC activity.

[1095] Alternatively, or in addition, EPCs function is assessed by detecting secretion of an angiogenic factor, e.g., VEGF, hepatocyte growth factor, granulocyte-colony stimulating factor, Macrophage migration inhibitory factor interleukin 8 For example, cells are cultured for a suitable period of time (e.g., 1-6 days) and the level of angiogenic factors in culture medium determined using, for example, an ELISA or a FLISA. Secretion of higher levels of angiogenic factors than a non-EPC endothelial cell indicates EPC activity. Compounds that reduce secretion of angiogenic factors are considered to be inhibitors of EPC activity.

[1096] As will be apparent to the skilled artisan, methods of screening may involve detecting levels of cell death, cell proliferation and/or cell survival. Such methods are known in the art.

[1097] In one example, death of isolated EPCs in the presence or absence of a compound is assayed (e.g., to isolate a compound that kills EPCs), e.g., using a method for the detection of cellular components associated with cell death, such as, for example, apoptosis. Methods for detecting cell death in a cell are known in the art. For example, APOPTEST (available from Immunotech) stains cells early in apoptosis, and does not require fixation of the cell sample (Martin et al., 1994). This method utilizes an annexin V antibody to detect cell membrane re-configuration that is characteristic of cells undergoing apoptosis. Apoptotic cells stained in this manner can then be sorted either by FACS, ELISA or by adhesion and panning using immobilized annexin V antibodies. Alternatively, a terminal deoxynucleotidyl transferase-mediated biotinylated UTP nick end-labeling (TUNEL) assay is used to determine the level of cell death. The TUNEL assay uses the enzyme terminal deoxynucleotidyl transferase to label 3′-OH DNA ends, generated during apoptosis, with biotinylated nucleotides. The biotinylated nucleotides are then detected by using streptavidin conjugated to a detectable marker. Kits for TUNEL staining are available from, for example, Intergen Company, Purchase, N.Y. Alternatively, or in addition, an activated caspase, such as, for example, Caspase 3 is detected. Several caspases are effectors of apoptosis and, as a consequence, are only activated to significant levels in a cell undergoing programmed cell death. Kits for detection of an activated caspase are available from, for example, Promega Corporation, Madison Wis., USA. Such assays are useful for both immunocytochemical or flow cytometric analysis of cell death. Such assays can be performed with other cells, e.g. mature endothelial cells to identify and/or isolate compounds that selectively kill EPCs.

[1098] In one example, the phenotype being assayed is cell survival. Cell survival may simply be detected by maintaining the cells for a sufficient time for a visible colony of cells to form. Clearly, this provides a simple method for high-throughput screening of compounds as compounds capable of inducing cell survival are easily recovered from the colony of cells.

[1099] Alternatively, cell viability or cell metabolism may be detected and/or assayed. By way of example, non-fluorescent resazurin is added to cells cultured in the presence of a peptide of the present disclosure. Viable cells reduce resazurin to red-fluorescent resorufin, easily detectable using, for example, microscopy or a fluorescent plate reader. This marker of cell viability is useful for a variety of different cell types, from bacteria to higher eukaryotes. Kits for analysis of cell viability are available, for example, from Molecular Probes, Eugene, Oreg., USA. Other assays for cell viability include, for example, assays that detect Water-Soluble Tetrazolium GLT008 (WST-8) reduction to formazan salt in live cells (Alexis Biochemicals), staining of live cells with cell-permeable calcein acetoxymethyl (calcein AM) which is converted to fluorescent calcein by intracellular esterases, detection of reduction of 3′-{1-[(phenylamino)carbonyl]-3,4-tetrazolium}-bis(4-methoxy-6-nitro)benzenesulfonic acid hydrate] (XTT) to formazan salt (Intergen), or (4,5-dimethylthiazol-2-yl)-5-(3-carboxymethoxyphenyl)-2-(4-sulfophenyl)-2H-tetrazolium) PES: phenazine ethosulfate (MTS) reduction to formazan salt (Promega Corporation).

[1100] In yet another example, the phenotype of interest is cellular proliferation. Methods for determining cellular proliferation are known in the art. For example, incorporation of ³H-thymidine or ¹⁴C-thymidine into DNA as it is synthesized is an assay for DNA synthesis associated with cell division. In such an assay, a cell is incubated in the presence of labeled thymidine for a time sufficient for cell division to occur. Following washing to remove any unincorporated thymidine, the label (e.g. the radioactive label) is detected, e.g., using a scintilation counter. Assays for the detection of thymidine incorporation into a live cell are available from, for example, Amersham Pharmacia Biotech. In another example, cellular proliferation is measured using a 3-(4, 5-dimethylthiazolyl-2)-2,5-diphenyltetrazolium bromide (MTT) assay. The yellow tetrazolium MTT is reduced by metabolically active cells, in part by the action of dehydrogenase enzymes, to generate reducing equivalents such as nicotinamide adenine dinucleotide (NADH) and nicotinamide adenine dinucleotide phosphate (NADPH). The resulting intracellular purple formazan is then solubilized and quantified by spectrophotometric means. Assay kits for MTT assays are available from, for example, American Type Culture Collection (ATCC; Rockville, Md.).

[1101] Alternative assays for determining cellular proliferation, include, for example, measurement of DNA synthesis by 5-bromo-2-deoxyuridine (BrdU) incorporation (by ELISA or immunohistochemistry, kits available from Amersham Pharmacia Biotech), expression of proliferating cell nuclear antigen (PCNA) (by ELISA, FACS or immunohistochemistry, kits available from Oncogen Research Products) or a Hoechst cell proliferation assay that detects DNA synthesis (available from Trevigen Inc.).

[1102] In the case of a compound that is an antibody, an assay to determine a compound that inhibits or reduces EPC activity can assess the ability of the compound to induce ADCC or CDC or antibody-dependent cell-mediated phagocytosis (ADCP) and kill (including lyse) an EPC. Methods for assessing ADCC, CDC and ADCP are known in the art.

[1103] For example, the ability of an antibody to induce CDC involves culturing the antibody and EPCs in the presence of complement factors (commercially available from, e.g., Sigma Aldrich) and a compound that is taken up by viable cells. Following washing, the amount of compound taken up by cells is detected. A reduction in the amount of compound taken up in the presence of an antibody compared to in the absence of the antibody indicates that the antibody induces CDC. Other methods for assessing CDC are known in the art and encompassed by the present disclosure, e.g., as described by Gazzano-Santoro et al., (1996).

[1104] A method for assessing ADCC activity involves incubating EPCs in the presence of an antibody and immune effector cells, e.g., PBMCs. The amount of lactate dehydrogenase activity in the supernatant of cell cultures is indicative of the amount of ADCC activity. Lactate dehydrogenase activity is assessed sing a commercially available kit (e.g., from Roche). Increased lactate dehydrogenase levels in the presence of antibody compared to in the absence of antibody indicates that the antibody induces ADCC. Alternatively, or in addition, a ⁵¹Cr release assay is performed to assess EPC cell death mediated by ADCC. Additional methods for assessing ADCC are described, for example, in U.S. Pat. No. 5,500,362 or U.S. Pat. No. 5,821,337.

[1105] ADCP is assessed, for example, by labeling EPCs with a fluorescent label, e.g., PKH2 green fluorescence dye. The labeled EPCs are then incubated with mononuclear cells (e.g., PBMCs) in the presence or absence of antibody. Following a sufficient time, cells are incubated with a labeled antibody against, for example, CD14 or CD11b. Cells staining for both the EPC label and CD14 or CD11b are considered to be mononuclear cells that have phagocytosed an EPC. An antibody that increases the number of double labeled cells (compared to the number present in the absence of antibody) is considered to induce ADCP.

### In Vivo Assays of EPC Function

[1106] In another example, a population of cells isolated by a method as described herein according to any example is determined by administering the cells to an animal model of a condition associated with EPCs. For example, the cells are administered to an animal lacking EPCs e.g., as a result of myeloablation or mice having defects in angiogenesis (e.g., Id1-deficient mice; Lyden et al., 2001). Cells that facilitate or contribute to neovascularization are considered to have EPC function. Alternatively, or in addition, cells are administered to an animal model of ischemia, such as, hind-limb ischemia and/or cardiovascular ischemia and/or stroke and the effect of the cells on neovascularization is determined. Exemplary models are described, for example, in Couffinhal et al. (1998) or Carmeliet et al. (2000).

[1107] In another example, EPC activity is assessed by mixing EPCs with matrigel to form a plug and administering the plug subcutaneously to a non-human mammal, e.g., a mouse. After a sufficient period, e.g., about 7 days, the plug is removed and analyzed microscopically for evidence of formation of blood vessels, i.e., neovascularization. An exemplary method is described in Bagley et al., (2003).

[1108] Compounds to be tested for their ability to suppress EPC activity and/or numbers can be administered to a test subject and the number of EPCs detected/isolated using standard methods or methods described herein. A reduction in the number of EPCs compared to the number of EPCs from an untreated subject indicates that the compound reduces EPC numbers.

[1109] Alternatively, or in addition, a compound is administered to an animal model of angiogenesis and the level of blood vessel formation determined. For example, a compound is administered to a test subject at the time of, prior to or following administration of tumor cells or induction of angiogenesis. The presence/absence and/or size of any resulting tumor are then assessed and compared to subjects to which the cells but not the compound has been administered. For example, the amount of vascularization is determined in the tumor test tissue to determine a compound that suppresses neovascularization. Models of excessive angiogenesis include Iris Pharma Inc's models of ocular angiogenesis, or an alginate encapsulated tumor cell model, e.g., as described in Hoffmann et al., (1997).

### Kits

[1110] The present disclosure also provides therapeutic/prophylactic/diagnostic kits comprising compounds of the present disclosure for use in the present detection/isolation/diagnostic/prognostic/treatment/prophylactic methods. Such kits will generally contain, in suitable container means, a compound of the present disclosure. The kits may also contain other compounds, e.g., for detection/isolation/diagnosis/imaging or combined therapy. For example, such kits may contain any one or more of a range of anti-inflammatory drugs and/or chemotherapeutic or radiotherapeutic drugs; anti-angiogenic agents; anti-tumor cell antibodies; and/or anti-tumor vasculature or anti-tumor stroma antibodies or coaguligands or vaccines.

[1111] Exemplary kits comprise a compound that binds to a protein set forth in any one or more of Tables 1-6, e.g., an antibody of the disclosure.

[1112] In one example, the kit is for detecting a protein set forth in any one or more of Tables 1-6 and additionally comprises a reagent to facilitate detection (a detectable label and/or a substrate of a detectable label. Such kits may additionally comprise a positive control.

[1113] In another example, the kit is for isolating an EPC. In such kits the compound may be labeled with a detectable label to facilitate FACS. The compound may also be labeled with a magnetic or paramagnetic particle to facilitate MACS. The compound may also be immobilized on a solid or semi-solid substrate to facilitate isolation.

[1114] In a further example, the kit is for treatment or prevention of an EPC-associated condition. In such kits the molecule may be provided in solution or in a lyophilized form, optionally with a solution for resuspension. The compound may be conjugated to a therapeutic compound or the kit may include a therapeutic compound for conjugation thereto. As discussed above, the kit may also comprise additional therapeutic or prophylactic compounds.

[1115] Alternatively or in addition, a kit for therapy or prophylaxis comprises one or more compounds that bind(s) to a protein set forth is any one of Tables 1-6 immobilized on a solid support suitable for administering to a subject in the form of a vascular graft.

[1116] The present disclosure includes the following non-limiting examples.

### Example 1

### Identification of Markers of EPCs Using Recombinant Cells

### 1.1 Materials and Methods

### Cell Treatment and Harvesting

[1117] Human umbilical vein endothelial cells (HUVECs) were isolated from human umbilical cords using collagenase type 1 and then grown on gelatin-coated T flasks. Cells at passage 2 at 60% confluence were transduced with adenovirus containing sphingosine kinase 1 cDNA (Ad-SK-1) or empty vector adenovirus (Ad-EV) (Limaye et al., 2005; and Bonder et al., 2009) and harvested four days later. Cells were sorted based on CD34 expression using CD34 microbeads and miniMACS columns (Miltenyi Biotec). CD34 surface expression was detected by staining an aliquot of the sorted cells with anti-human CD34-PE antibodies followed by flow cytometry. Cell number and viability was determined by staining an aliquot with trypan blue and then counting with a hemocytometer.

### RNA Isolation and Purification

[1118] CD34 sorted cells from untreated, Ad-SK-1 and Ad-EV treated HUVEC were lysed in RLT buffer (RNeasy Micro kit, Qiagen) supplemented with 0.1% beta mercapto-ethanol and stored at −70° C. Lysates were thawed on ice, triturated 10× using a 26G needle/1 ml syringe; and RNA was purified using the RNeasy Micro kit, which included an on-column DNase step, and eluted in RNase-free water and then stored at −70° C. RNA quantity and integrity were determined using an Agilent Bioanalyzer. RNA samples obtained from cell lines which showed increased SK-1 activity of ˜5-10 fold (³²P-based kinase assay), an increase in CD34 surface expression, and good RNA yield and quality were chosen for microarray analysis.

### Microarray Analysis

[1119] RNA expression was analyzed using two different microarray platforms, one at the Adelaide Microarray Centre (AMC) and the other at Amgen, Inc. USA. For microarray analysis performed at AMC, generation and labeling of complementary RNA was achieved using the Whole Transcript (WT) Sense Target Labeling Assay. Labeled complementary RNA was hybridized to GeneChip® Human Gene 1.0 ST Arrays (Affymetrix, Inc). For the analysis performed at Amgen, Inc, labeling was achieved using the Nugen Ovation kit, followed by hybridization to the Affymetrix U133 Plus 2.0 arrays (i.e. 3′ arrays).

### Data Analysis

[1120] For the AMC microarray data, RNA expression differences were initially analyzed using the Partek Genomics Suite, including normalization using robust multiarray averaging (RMA) with GC probe content correction. A list of genes was generated for all 4 cell line comparisons as well as 3-way comparisons with standard p-values calculated. More in-depth analysis was performed using software obtained through the Bioconductor project (Gentleman et al., 2004) using mainly affy (Gautier, et al., 2004) and limma (Smyth, 2005) packages. P-values from the more in-depth analysis were adjusted for multiple testing by controlling the false discovery rate, the expected proportion of false discoveries amongst the rejected hypotheses (Benjamini, et al., 1995). Using this more in-depth analysis, the top 100 potentially regulated genes were selected from comparisons of SK-1 over-expressing cells to either untreated controls or cells transduced with an empty vector adenovirus. The analysis was performed using all 4 cell lines as well as with all combinations of 3-way comparisons. A resulting list of 319 genes was generated and combined with the list of genes from the preliminary Partek data analysis.

[1121] Data analysis of the microarray data generated at Amgen, Inc. was performed in Rosetta Resolver. Intensities were generated in the Affymetrix Rosetta Intensity Profile Builder pipeline, followed by normalisation using the Affymetrix Rosetta Intensity Experiment Builder. Differential expression was obtained using the Affymetrix Ratio Builder (no error weighting). Standard p-values were calculated.

### 1.2 Results

[1122] A list of transcripts derived from both microarray data sets (see Table 7) was generated for the most highly over-expressed genes (lower limit of 1.3 fold increase) which can code for cell surface proteins.

TABLE 7
Genes selected from microarray analysis

| | | | | | Comparison | | | |
|---|---|---|---|---|---|---|---|---|
| | | Fold | | Common Gene | Groups | | Nucleotide | Amino Acid |
| Accession | Gene Name | Change | P-value | Name | (Cell | Location | SEQ ID NO; | SEQ ID NO: |
| NM_016512 | SPAG11B | 3.17 | 0.04 | sperm associated | all 4 | Extracellular Space | 237 | 238 |
| | transcript variant A | | | antigen 11B, | | | | |
| | | | | transcript variant A | | | | |
| NM_025074 | FRAS1 | 2.98 | 0.02 | Fraser syndrome 1 | all 4 | Extracellular Space | 239 | 240 |
| NM_175924 | ILDR1 | 2.74 | 0.01 | immunoglobulin- | all 4 | Plasma Membrane | 241 | 242 |
| | | | | like domain | | | | |
| | | | | containing | | | | |
| | | | | receptor 1 | | | | |
| NM_012156 | EPB41L1, | 2.3 | 0.02 | erythrocyte | all 4 | Plasma Membrane | 243 | 244 |
| | transcript variant 1 | | | membrane protein | | | | |
| | | | | band 4.1-like 1, | | | | |
| | | | | transcript variant 1 | | | | |
| NM_001187 | BAGE | 2.22 | 0.02 | B melanoma | all 4 | unknown | 245 | 246 |
| | | | | antigen | | | | |
| NM_000826 | AMPA2, | 2.17 | 0.03 | glutamate | all 4 | Plasma Membrane | 247 | 248 |
| | transcript variant 1 | | | receptor, | | | | |
| | | | | ionotropic, | | | | |
| | | | | AMPA2 | | | | |
| NM_031912 | SYT15, transcript | 2.16 | 0.05 | synaptotagmin | all 4 | Cytoplasm | 249 | 250 |
| | variant a | | | XV, transcript | | | | |
| | | | | variant a | | | | |
| NM_015090 | NFASC, | 2.03 | 0.04 | neurofascin | all 4 | Plasma Membrane | 251 | 252 |
| | transcript variant 4 | | | homolog | | | | |
| | | | | (chicken), | | | | |
| | | | | transcript variant 4 | | | | |
| AI401535 | EST (Clone | 1.89 | 0.03 | expressed | all 4 | Plasma Membrane | 253 | 254 |
| | IMAGE: 2110090) | | | sequence tag; low | | | | |
| | | | | quality annotation - | | | | |
| | | | | neuroligin 1 | | | | |
| NM_001004433 | SLC30A10, | 1.72 | 0.04 | solute carrier | all 4 | unknown | 255 | 256 |
| | transcript variant 2 | | | family 30, | | | | |
| | | | | member 10, | | | | |
| | | | | transcript variant 2 | | | | |
| NM_018974 | UNC93A, | 1.71 | 0.01 | unc-93 homologue | all 4 | Plasma Membrane | 257 | 258 |
| | transcript variant 1 | | | A (C. elegans), | | | | |
| | | | | transcript variant 1 | | | | |
| NM_012353 | OR1C1 | 1.69 | 0.04 | olfactory receptor, | all 4 | Plasma Membrane | 259 | 260 |
| | | | | family 1, | | | | |
| | | | | subfamily C, | | | | |
| | | | | member 1 | | | | |
| NM_001079669 | TMTC4, | 1.45 | 0.03 | transmembrane | all 4 | unknown | 261 | 262 |
| | transcript variant 2 | | | and | | | | |
| | | | | tetratricopeptide | | | | |
| | | | | repeat containing | | | | |
| | | | | 4, transcript | | | | |
| | | | | variant 2 | | | | |
| NM_001830 | CLCN4 | 1.39 | 0.02 | chloride channel 4 | all 4 | Plasma Membrane | 263 | 264 |
| NM_030959 | OR12D3 | 2.46 | | olfactory receptor, | 2, 3, 5 | Plasma Membrane | 265 | 266 |
| | | | | family 12, | | | | |
| | | | | subfamily D, | | | | |
| | | | | member 3 | | | | |
| NM_024850 | BTNL8, transcript | 1.96 | | butyrophilin-like | 1, 3, 5 | unknown | 267 | 268 |
| | variant 1 | | | protein 8 | | | | |
| | | | | precursor, | | | | |
| | | | | transcript variant 1 | | | | |
| NM_020949 | SLC7A14 | 1.66 | | solute carrier | all 4 | unknown | 269 | 270 |
| | | | | family 7, member | | | | |
| | | | | 14 | | | | |
| NM_001005191.1 | OR7D4 | 1.63 | | olfactory receptor, | 2, 3, 5 | Plasma Membrane | 271 | 272 |
| | | | | family 7, | | | | |
| | | | | subfamily D, | | | | |
| | | | | member 4 | | | | |
| AF147791 | MUC12 | 1.574 | | mucin 12, cell | 2, 3, 5 | Extracellular Space | 273 | 274 |
| | | | | surface associated | | | | |
| BC039116 | TRGC2 | 1.554 | | T cell receptor | 2, 3, 5 | Plasma Membrane | 275 | 276 |
| | | | | gamma constant 2 | | | | |
| | | | | (cDNA clone | | | | |
| | | | | IMAGE: 4829750) | | | | |
| NR_003668 | DEF109P1B | 1.55 | 0.03 | defensin, beta 109, | all 4 | unknown | 277 | 278 |
| | | | | pseudogene 1B, | | | | |
| | | | | noncoding RNA | | | | |
| NM_001034837 | KCNIP1, | 1.52 | | Kv channel | 1, 3, 5 | Plasma Membrane | 279 | 280 |
| | transcript variant 1 | | | interacting protein | | | | |
| | | | | 1, transcript | | | | |
| | | | | variant 1 | | | | |
| BC033223 | SLC45A4 | 1.5 | | solute carrier | 1, 3, 5 | unknown | 281 | 282 |
| | | | | family 45, | | | | |
| | | | | member 4 (cDNA | | | | |
| | | | | clone | | | | |
| | | | | IMAGE: 5019517) | | | | |
| NM_153343 | ENPP6 | 1.49 | | ectonucleotide | 1, 2, 5 | Cytoplasm | 283 | 284 |
| | | | | pyrophosphatase/ | | | | |
| | | | | phosphodiesterase 6 | | | | |
| NM_019120 | PCDHB8 | 1.49 | | protocadherin beta 8 | 1, 2, 3 | Plasma Membrane | 285 | 286 |
| NM_001005495 | OR2T3 | 1.45 | | olfactory receptor, | all 4 | unknown | 287 | 288 |
| | | | | family 2, | | | | |
| | | | | subfamily T, | | | | |
| | | | | member 3 | | | | |
| NM_001004741 | OR5M10 | 1.34 | 0.053 | olfactory receptor, | all 4 | Plasma Membrane | 289 | 290 |
| | | | | family 5, | | | | |
| | | | | subfamily M, | | | | |
| | | | | member 10 | | | | |
| NM_001004725 | OR4S1 | 1.32 | 0.048 | olfactory receptor, | all 4 | unknown | 291 | 292 |
| | | | | family 4, | | | | |
| | | | | subfamily S, | | | | |
| | | | | member 1 | | | | |
| NM_016540 | GPR83 | 1.31 | 0.017 | G protein-coupled | all 4 | Plasma Membrane | 293 | 294 |
| | | | | receptor 83 | | | | |
| NM_176888 | TAS2R19 | 1.3 | 0.048 | taste receptor, type | all 4 | unknown | 295 | 296 |
| | | | | 2, member 19 | | | | |
| NM_000216 | KAL1 | 1.3 | 0.011 | Kallmann | all 4 | Extracellular Space | 297 | 298 |
| | | | | syndrome 1 | | | | |
| | | | | sequence | | | | |
| NM_019844 | SLCO1B3 | 1.37 | | solute carrier | all 4 | Plasma Membrane | 299 | 300 |
| | | | | organic anion | | | | |
| | | | | transporter family, | | | | |
| | | | | member 1B3 | | | | |
| AL133267 | multiple (1 gene; | 1.42 | 0.022 | Human DNA | all 4 | Plasma Membrane | 301 | 302 |
| | 3 pseudogenes) | | | sequence from | | | | |
| | | | | clone RP3- | | | | |
| | | | | 408B20 on | | | | |
| | | | | chromosome 6. | | | | |
| | | | | Contains a gene | | | | |
| | | | | and two | | | | |
| | | | | pseudogenes for 7 | | | | |
| | | | | transmembrane | | | | |
| | | | | receptor | | | | |
| | | | | (rhodopsin family) | | | | |
| | | | | (olfactory receptor | | | | |
| | | | | like) proteins and | | | | |
| | | | | a 60S acidic | | | | |
| | | | | ribosomal protein | | | | |
| | | | | P2 (RPLP2) | | | | |
| | | | | pseudogene, | | | | |
| | | | | complete | | | | |
| | | | | sequence. 7 | | | | |
| | | | | transmembrane | | | | |
| | | | | receptor | | | | |
| | | | | (rhodopsin family) | | | | |
| | | | | (olfactory receptor | | | | |
| | | | | like) pseudogene | | | | |
| | | | | (hs6M1-33P) | | | | |
| M60028 | HLA_DQB1 | 1.31 | 0.04 | major | all 4 | Plasma Membrane | 303 | 304 |
| | | | | histocompatability | | | | |
| | | | | complex, class II, | | | | |
| | | | | DQ beta 1 | | | | |
| NM_001627 | ALCAM | 3.3 | 0.02 | activated | all 4 | Plasma Membrane | 305 | 306 |
| | | | | leukocyte cell | | | | |
| | | | | adhesion molecule | | | | |
| | | | | (CD166) | | | | |
| NM_013447 | EMR2, transcript | 1.457 | 0.0184 | egf-like module | all 4 | Plasma Membrane | 17 | 18 |
| | variant 1 | | | containing, mucin- | | | | |
| | | | | like, hormone | | | | |
| | | | | receptor-like 2, | | | | |
| | | | | transcript variant 1 | | | | |
| | | | | (CD312) | | | | |
| NM_144717 | IL20RB | 2.77 | 0.03 | Interleukin 20 | all 4 | Plasma Membrane | 307 | 308 |
| | | | | receptor beta | | | | |
| NM_001006624 | PDPN, transcript | 2.22 | 0.04 | podoplanin | all 4 | Plasma Membrane | 309 | 310 |
| | variant 3 | | | transcript variant 3 | | | | |
| NM_000740 | CHRM3 | 2.2 | 0.02 | cholinergic | all 4 | Plasma Membrane | 311 | 312 |
| | | | | receptor, | | | | |
| | | | | muscarinic 3 | | | | |
| NM_002211 | ITGB1, transcript | 1.74 | 0.04 | integrin, beta 1 | all 4 | Plasma Membrane | 313 | 314 |
| | variant 1A | | | (fibronectin | | | | |
| | | | | receptor, beta | | | | |
| | | | | polypeptide, | | | | |
| | | | | antigen CD29 | | | | |
| | | | | includes MDF2, | | | | |
| | | | | MSK12), | | | | |
| | | | | transcript variant | | | | |
| | | | | 1A | | | | |
| NM_014442 | SIGLEC8 | 1.72 | 0.04 | sialic acid binding | all 4 | Plasma Membrane | 315 | 316 |
| | | | | Ig-like lectin 8 | | | | |
| | | | | (CD329) | | | | |
| NM_001010935 | RAP1A, | 1.55 | 0.008 | member of RAS | all 4 | Cytoplasm | 317 | 318 |
| | transcript variant 1 | | | oncogene gamily, | | | | |
| | | | | transcript variant 1 | | | | |
| NM_025179 | PLXNA2 | 1.52 | 0.03 | plain A2 | all 4 | Plasma Membrane | 319 | 320 |
| NM_014511 | KIR2DL3, | 1.9 | 0.01 | killer cell | all 4 | Plasma Membrane | 321 | 322 |
| | transcript variant 1 | | | immunoglobulin- | | | | |
| | | | | like receptor, two | | | | |
| | | | | domains, long | | | | |
| | | | | cytoplasmic tail, | | | | |
| | | | | 3, transcript | | | | |
| | | | | variant 1 | | | | |
| | | | | (CD158b) | | | | |
| NM_005292 | GPR18, transcript | 1.65 | | G protein-coupled | 2,3,5 | Plasma Membrane | 75 | 76 |
| | variant 1 | | | receptor 18, | | | | |
| | | | | transcript variant 1 | | | | |
| NP_031386.1 | KLRK1 | 1.59 | | CD314, killer cell | all 4 | Plasma Membrane | 323 | 324 |
| | | | | lectin-like | | | | |
| | | | | receptor, | | | | |
| | | | | subfamily K, | | | | |
| | | | | member 1 | | | | |
| NM_001337 | CX3CR1 | 1.562 | | chemocine | 2,3,5 | Plasma Membrane | 325 | 326 |
| | | | | (C—X3—C) | | | | |
| | | | | receptor 1, | | | | |
| | | | | CCRL1 | | | | |

### Example 2

### Identification of Markers of EPCs Using Non-Adherent CD133⁺ EPCs

### 2.1 Materials and Methods

### Isolation of Target Cells

[1123] Donor blood (20-170 ml) was diluted in 1:1 ratio with sterile phosphate buffered saline (PBS) and layered on 15 mL of Lymphoprep™ (Axis-Shield, Oslo, Norway) in falcon tubes. Cells were then centrifuged at 400 g for 30 minutes at room temperature. Mononuclear cells (MNCs) were isolated and washed thrice with HUVE media (Media 199 (Sigma); supplemented with 20% FCS, 1.5% sodium bicarbonate, 2% HEPES buffer solution, penicillin-streptomycin, non-essential amino acids and sodium pyruvate (GIBCO)).

[1124] Mononuclear cells (MNCs) were incubated with 100 μA of human FcR blocking reagent (Miltenyi Biotec, Auburn, Calif., USA) and 100 μA of CD133 antibody microbeads (MACS, Miltenyi Biotec) for 30 min at 4° C. as per manufacturer's instructions prior to re-suspension in MACS buffer (2 mM ethylenediaminetetraacetic acid (EDTA)/PBS and 0.5% BSA/PBS). The CD133 cells were isolated using an AutoMacsPro (Miltenyi Biotec). Isolated cells were then centrifuged at 4° C. and resuspended at a concentration of 0.5−1×10⁶ cells/ml in endothelial growth media (EGM-2) complete with bullet kit (Lonza) and supplemented with 10% FCS, vascular endothelial growth factor (VEGF; 5 ng/mL, Sigma, St Louis, Mo., USA), insulin-like growth factor-1 (IGF-1; 1 pg/mL, Gibco Invitrogen, Gaithersburg, Md., USA), basic fibroblast growth factor (bFGF; ing/mL, 1/25000, R&D) and ascorbic acid (1 mM, Sigma). Cells were seeded in a 24-well plate pre-coated with fibronectin and incubated at 37° C. and 5% CO₂. During culture, non-adherent cells were transferred to a new pre-coated fibronectin well and cultured for 48-72 hours in fresh EGM-2 media. These cells were cultured for 2, 4, 7, or 10 days prior to harvesting for further analysis.

### Preparation of Human Umbilical Vein Endothelial Cells (HUVECs)

[1125] Primary HUVECs were extracted from human umbilical veins by collagenase digestion, as described previously (Litwen et al., 1998). HUVECs were used no later than two passages.

### Gene Array

[1126] Total RNA was isolated from natural EPCs and donor matched mature endothelial cells from human umbilical cords (HUVECs) from 4 biological replicates using an RNEasy micro plus kit (QIAGEN, Hilden, Germany). RNA integrity and quantity was determined using an Experion analysis kit prior to conducting microarray experiments (BioRad). 150 ng of RNA was amplified and labelled using Ovation system by NuGen. The labelled and amplified RNA was hybridized to Affymetrix Human Exon 1.0ST arrays as per the manufacturer's protocol (Affymetrix) in the microarray facility at Mater Adult Hospital, Brisbane.

[1127] Human affymetrix exon arrays were scanned with GeneScanner 3000, 7G. The raw CEL and CHP data was acquired and imported into GeneSpring GX version 11 (Agilent) for data analysis. Robust multi-array analysis (RMA) was used for normalizing and summarizing probe level intensity measurements from Affymetrix gene chips. Hybridization quality for each array was assessed using box plots and principal component analysis (PCA) of probe-level data.

[1128] Expression profiling was performed on the following group of experiments created using Genespring GX11 to identify differentially expressed genes.

[1129] 1. Day 4 natural EPCs vs matched day 4 HUVECs.

[1130] 2. Day 7 natural EPCs vs matched day 4 HUVECs

[1131] 3. Day 4 natural EPCs vs day 7 natural EPCs.

[1132] A parametric Welch's t-test (where variances were not assumed equal) was performed on 19524 probes independently for both day 4 and day 7 EPCs with a p-value cut off of 0.05 and a fold change cut off of 1.5. Multiple testing correction (Benjamini and Hochberg False Discovery Rate) was then applied to genes that had passed the parametric Welch's t-test based on the total detected probe-set of 14246 probes to reduce false positives. Following this statistical filtering, a total of 977 genes in experiment condition 1 (day 4 EPCs vs HUVECs) and 1650 genes in experiment condition 2 (day 7 EPCs vs HUVECs) were significantly upregulated in EPCs. There was no change observed in the gene expression in the third experimental condition (day 4 EPCs vs day 7 EPCs). A heatmap representing gene expression changes between EPCs cultured for 4 days and HUVECs cultured for less than 2 passages are shown in FIG. 1. This figure indicates there are considerable gene expression differences between the EPC and HUVEC cell populations.

[1133] The significantly upregulated genes were grouped according to their potential relevant functions in EPCs. Functional categorization of genes was performed using a combination of Agilent technologies gene ontology classifications and Ingenuity Pathway Analysis (IPA, http://www.ingenuity.com). The up-regulated genes included those which are known surface markers for EPCs including CD133 and c-KIT. The uniqueness of EPCs was illustrated by the differences in the expression level of well established endothelial markers (e.g., CD31, CD144 and CD62E) compared to HUVECS.

[1134] Functionally categorized genes revealed a total of 137 membrane proteins in experiment condition 1. The gene list was further screened using Gene card, IPA, pubmed, BioGPS and genes that had been previously described in EPCs, endothelial cells and/or hematopoietic stem cells were excluded.

[1135] Multiple significant probes for the same gene were removed from final data tables with the probe with highest fold change being chosen.

### 2.2 Results

[1136] Significantly differentially expressed genes for the first and second experiment group were selected and categorised as follows:
[1137] a) Category A list: Significantly upregulated with high fold change value in Day 4 EPCs vs HUVECs
[1138] b) Category B: High fold change value with a close to significant p-value in day 4 EPCs vs HUVECs.
[1139] c) Category C: Significantly upregulated with high fold change in Day 7 EPCs vs HUVECs.

[1140] The three lists were then combined to create a list of biomarkers.

[1141] The biomarkers were then analysed to identify those likely to be expressed on the cell surface using ‘Gene Card’ ‘Phobius’ and ‘IPA’.

[1142] Results of these analyses are set out below in Table 8.

### Example 3

### Validation of Biomarkers by Low Density Array

[1143] Total RNA was isolated from CD133⁺ sorted 4 day cultured EPCs (prepared essentially as described in Example 2) and from donor matched HUVEC from 4 biological replicates using an RNEasy micro plus and RNEasy mini kit, respectively (QIAGEN, Germany). Total EPC RNA (300-700 ng) is converted to cDNA using a High Capacity cDNA Transcription Kit (Applied Biosysytems) with an equivalent amount of HUVEC RNA isolated using the same protocol. Each cDNA synthesis reaction was combined with TaqMan® Universal PCR master mix and loaded equally into 4 sample fill-reservoirs of a Custom TaqMan® Low Density Array (Format 96b). Amplification and data acquisition was carried out on a 7900HT Real-Time PCR System (Applied Biosystems). Donor matched EPCs and HUVEC were loaded on the same array. Relative quantitation (RQ) of targets is performed using the comparative Ct (ΔΔCT) method using RQ manager (SDSv2.3 software, Applied Biosystems). The Custom TaqMan® Low Density Array was built using validated TaqMan® gene expression assays. Each target was validated in duplicates with 4 different biological donors.

[1144] Results of low density array analysis are set out in Table 8.

### Example 4

### Validation of Biomarkers by Flow Cytometry

### 4.1 Materials and Methods

[1145] Antibodies were obtained from commercial sources. For each antibody the appropriate isotype-control (species, Ig isotype and company) is used.

[1146] Analyses of the reactivity of the target antibodies was performed using a three-step “high sensitivity” staining protocol on HUVEC, natural EPCs (prepared essentially as described in Example 2), peripheral blood (collected using lithium-heparin anticoagulant) or umbilical cord blood. Cells were sedimented using centrifugation and resuspended in HUVE wash (Media 199 (Sigma), 2% fetal calf serum, 1% 10 mM HEPES and 1% penicillin streptomycin solution (Gibco)) at a concentration of about 5×10⁴-10⁶ cells per assay. For peripheral blood samples, 100 μl was used per assay.

[1147] Cells (EPCs, HUVECs and peripheral blood cells) were sedimented using centrifugation, resuspended and treated with 100 Human FcR block (Miltenyi Biotec) diluted in 30 μl HUVE wash. Samples were then incubated on ice for 10 minutes prior to addition of primary antibodies. Cells were incubated in 100 μl of diluted primary antibody for 30 minutes followed by a wash. Cells were sedimented by centrifugation, resuspended and incubated for 30 minutes on ice with appropriate secondary antibody diluted in cold HUVE wash. Cells were washed with 1 ml of FACS wash, sedimented by centrifugation and resuspended. Cells were then blocked with 5 μl of normal mouse serum at 4° C. for 10 minutes. Conjugated streptavidin (PE, APC or PE-Cy7 conjugated) (BD Biosciences Pharmingen) was added at 0.2 μg per test along with panels of mouse anti-human conjugated antibodies; anti-CD34-Pe-Cy7 for progenitor cells, CD144-FITC for HUVEC, anti-VEGFR2, anti-CD117-APC and anti-CD133-PE for EPC, anti-CD31 for vascular cells and antiCD45, anti-CD11b-PE-Cy7 and anti-CD14-APC for PB, (all BD Biosciences) were used according to the manufacturer's instructions for flow cytometry. Cells were then washed with 1 ml FACS wash. Blood samples were incubated with 1.5 ml 1×BD Pharmingen Lyse™ diluted in water at room temperature. Cells were again sedimented by centrifugation and resuspended. Cells were resuspended in FACS fix (1% formaldehyde, 20 g/L glucose, 5 mM sodium azide, made up in PBS) prior to analysis using a FACS Aria II (BD Biosciences) with FACS DIVA (BD Biosciences). Further analysis was performed using FCS Express V3.0 (De Novo Software, LA, Calif., USA).

[1148] Biomarkers were screened for surface expression on HUVEC (test antibody/CD34 or CD144) and PBMCs (test/forward scatter/side scatter settings). If the biomarker was not detectable at levels significantly above isotype control on HUVECs and PBMCs, targets were screened for EPC staining (test antibody/CD133⁺/CD117⁺). For EMR2 studies, expression was also studied on U937 cells and Jurkat T cells.

### 4.2 Results

[1149] Results of analyses of expression of DSG2 and EMR2 are shown in FIGS. 2-5 and Table 8.

[1150] Results presented in FIG. 2 show that EMR2 is expressed on a large percentage of EPCs analyzed and to a much lesser degree on HUVECs. EMR2 was also expressed on U937 myeloid cells, but not on Jurkat T cells.

[1151] FIG. 3 shows that DSG2 is expressed on a significant proportion of EPCs analysed and on very few HUVECs. Panel B of FIG. 3 also demonstrates that DSG2 is expressed on CD133⁺CD117⁺ progenitor cells in PBMNCs. The data presented in FIG. 3 suggest that DSG2 can be used to isolate EPCs from peripheral blood samples.

[1152] An anti-DSG2 antibody was used to isolate cells from freshly isolated umbilical cord blood and those cells analysed for cell surface marker expression. As shown in FIG. 4, cells isolated using anti-DSG2 antibody express the progenitor cell marker CD34 and the vascular marker CD31. Cells expressing CD34 and CD31 could also be isolated using anti-CD133 antibody. However, the populations isolated using anti-CD133 antibody or anti-DSG2 antibody as the capture reagent do not appear to be identical.

[1153] Further characterization of DSG2 expressing cells isolated from freshly isolated human umbilical cord blood showed that after culturing in EC supportive medium for four days the cells express vascular markers VEGFR2 and CD31, the progenitor marker CD34 and express low levels of progenitor markers CD133 and CD45. These cultured cells retain DSG2 expression.

TABLE 8
Biomarkers of EPCs.

| | | | | | | | | | | Amino |
|---|---|---|---|---|---|---|---|---|---|---|
| | | microarray | LDA | | | | | | Nucleotide | Acid |
| | Entrez Gene | Fold | Fold | EPC | EC | Reference | TM | | SEQ ID | SEQ |
| Gene ID | Name | Change | change | flow | flow | Sequence | domains | Location | NO | ID NO: |
| EMB | embigin | 6.0 | 85 | | | NM_198449; | 1 | Plasma | 1 | 2 |
| | homolog | | | | | NR_003955 | | Membrane | | |
| | (mouse) | | | | | | | | | |
| SLC15A2 | solute carrier | 7.4 | 60 | | | NM_021082 | 9 | Plasma | 19 | 20 |
| | family 15 | | | | | | | Membrane | | |
| | (H+/peptide | | | | | | | | | |
| | transporter), | | | | | | | | | |
| | member 2 | | | | | | | | | |
| SLC16A6 | solute carrier | 4.0 | 9 | | | NM_004694 | 12 | Plasma | 21 | 22 |
| | family 16, | | | | | | | Membrane | | |
| | member 6 | | | | | | | | | |
| | (monocarboxylic | | | | | | | | | |
| | acid | | | | | | | | | |
| | transporter 7) | | | | | | | | | |
| SLC39A8 | solute carrier | 3.6 | 4 | | | NM_022154 | 6 | Extracellular | 3 | 4 |
| | family 39 | | | | | | | Space | | |
| | (zinc | | | | | | | | | |
| | transporter), | | | | | | | | | |
| | member 8 | | | | | | | | | |
| SIGLEC10 | sialic acid | 3.2 | 44 | | negative | NM_033130 | 1 | Plasma | 23 | 24 |
| | binding Ig-like | | | | | | | Membrane | | |
| | lectin 10 | | | | | | | | | |
| SIGLEC6 | sialic acid | 1.6 | 34 | | | NM_001245; | 1 | Extracellular | 25 | 26 |
| | binding Ig-like | | | | | NM_198845; | | Space | | |
| | lectin 6 | | | | | NM_198846 | | | | |
| AREG | amphiregulin | 5.7 | 30 | | negative | NM_001657 | 1 | Extracellular | 27 | 28 |
| | | | | | | | | Space | | |
| ITM2A | integral | 5.6 | 19 | | | NM_004867 | none | Plasma | 29 | 30 |
| | membrane | | | | | | | Membrane | | |
| | protein 2A | | | | | | | | | |
| GPM6B | glycoprotein | 3.2 | 41 | | | NM_001001995; | 4 | Plasma | 31 | 32 |
| | M6B | | | | | NM_001001996; | | Membrane | | |
| | | | | | | NM_005278; | | | | |
| | | | | | | NM_001001994 | | | | |
| CNR2 | cannabinoid | 3.1 | 128 | | negative | NM_001841 | 7 | Plasma | 33 | 34 |
| | receptor 2 | | | | | | | Membrane | | |
| | (macrophage) | | | | | | | | | |
| TM7SF3 | transmembrane 7 | 2.0 | 2 | | | NM_016551 | 7 | Plsma | 5 | 6 |
| | superfamily | | | | | | | Membrane | | |
| | member 3 | | | | | | | | | |
| PRSS21 | protease, | 1.7 | 112 | | | NM_006799; | none | Extracellular | 35 | 36 |
| | serine, 21 | | | | | NM_144956; | | Space | | |
| | (testisin) | | | | | NM_144957 | | | | |
| GPR174 | G protein- | 20.6 | 67 | | | NM_032553 | 7 | Plasma | 327 | 328 |
| | coupled | | | | | | | membrane | | |
| | receptor 174 | | | | | | | | | |
| NRG4 | neuregulin 4 | 4.5 | Not done | | | NM_138573 | 1 | Extracellular | 37 | 38 |
| | | | | | | | | Space | | |
| EPGN | epithelial | 9.1 | 0.5 | | | NM_001013442 | 1 | Extracellular | 39 | 40 |
| | mitogen | | | | | | | Space | | |
| | homolog | | | | | | | | | |
| | (mouse) | | | | | | | | | |
| RHBDD1 | rhomboid | 1.8 | 0.9 | | | NM_032276 | 4 | Extracellular | 41 | 42 |
| | domain | | | | | | | Space | | |
| | containing 1 | | | | | | | | | |
| PLXNC1 | plexin C1 | 8.6 | 51 | | negative | NM_005761 | 2 | Plasma | 7 | 8 |
| (CD232) | | | | | | | | Membrane | | |
| ABCC4 | ATP-binding | 2.1 | 2 | | negative | NM_005845; | 8 | Plasma | 43 | 44 |
| | cassette, sub- | | | | | NM_001105515 | | Membrane | | |
| | family C | | | | | | | | | |
| | (CFTR/MRP), | | | | | | | | | |
| | member 4 | | | | | | | | | |
| SORL1(LRP9) | sortilin-related | 18.7 | 145 | | negative | NM_003105 | 1 | Plasma | 45 | 46 |
| | receptor, | | | | | | | Membrane | | |
| | L(DLR class) | | | | | | | | | |
| | A repeats- | | | | | | | | | |
| | containing | | | | | | | | | |
| SLC8A1 | solute carrier | 6.4 | 1 | | | NM_021097; | 10 | Plasma | 47 | 48 |
| | family 8 | | | | | NM_001112800; | | Membrane | | |
| | (sodium/calcium | | | | | NM_001112801; | | | | |
| | exchanger), | | | | | NM_001112802 | | | | |
| | member 1 | | | | | | | | | |
| SLC22A16 | solute carrier | 3.8 | 594 | | | NM_033125 | 12 | Plasma | 49 | 50 |
| | family 22 | | | | | | | Membrane | | |
| | (organic | | | | | | | | | |
| | cation/carnitine | | | | | | | | | |
| | transporter), | | | | | | | | | |
| | member 16 | | | | | | | | | |
| SLC24A3 | solute carrier | 3.0 | 306 | | | NM_020689 | 11 | Plasma | 51 | 52 |
| | family 24 | | | | | | | Membrane | | |
| | (sodium/potassium/ | | | | | | | | | |
| | calcium | | | | | | | | | |
| | exchanger), | | | | | | | | | |
| | member 3 | | | | | | | | | |
| SLC2A5 | solute carrier | 2.8 | 1323 | | | NM_003039 | 5 | Plasma | 53 | 54 |
| | family 2 | | | | | | | Membrane | | |
| | (facilitated | | | | | | | | | |
| | glucose/fructose | | | | | | | | | |
| | transporter), | | | | | | | | | |
| | member 5 | | | | | | | | | |
| NCKAP1L | NCK- | 14.9 | 59 | | | NM_005337 | 1 | Plasma | 55 | 56 |
| | associated | | | | | | | Membrane | | |
| | protein 1-like | | | | | | | | | |
| EVI2B | ecotropic viral | 9.2 | 47 | | negative | NM_001003927 | 1 | Plasma | 57 | 58 |
| | integration site | | | | | | | Membrane | | |
| | 2B | | | | | | | | | |
| KCNQ5 | potassium | 8.8 | 164 | | negative | NM_019842 | | Plasma | 59 | 60 |
| | voltage-gated | | | | | | | Membrane | | |
| | channel | | | | | | | | | |
| P2RY14 | purinergic | 7.5 | 38 | | | NM_014879; | 7 | Plasma | 61 | 62 |
| | receptor P2Y, | | | | | Q15391; | | Membrane | | |
| | G-protein | | | | | BC034989; | | | | |
| | coupled, 14 | | | | | Q15391 | | | | |
| HTR1F | 5- | 6.3 | 1393 | | | NM_000866; | 7 | Plasma | 63 | 64 |
| | hydroxytryptamine | | | | | Q4QRI9; | | Membrane | | |
| | (serotonin) | | | | | BC069125; | | | | |
| | receptor 1F | | | | | P30939; | | | | |
| | | | | | | BC069125; | | | | |
| | | | | | | Q4QRI9 | | | | |
| TRAT1 | T cell receptor | 5.9 | 49 | | negative | NM_016388; | 1 | Plasma | 65 | 66 |
| | associated | | | | | Q6PIZ9 | | Membrane | | |
| | transmembrane | | | | | BC025713; | | | | |
| | adaptor 1 | | | | | Q6PIZ9 | | | | |
| GPR183 | G protein- | 5.5 | 5 | | | NM_004951 | 7 | Plasma | 67 | 68 |
| | coupled | | | | | | | Membrane | | |
| | receptor 183 | | | | | | | | | |
| OR13D1 | olfactory | 4.9 | 95 | | | NM_001004484 | 8 | Plasma | 69 | 70 |
| | receptor, | | | | | | | Membrane | | |
| | family 13, | | | | | | | | | |
| | subfamily D, | | | | | | | | | |
| | member 1 | | | | | | | | | |
| VSIG4 | V-set and | 4.9 | 29 | | negative | NM_007268; | 1 | Plasma | 71 | 72 |
| | immunoglobulin | | | | | NM_001100431 | | Membrane | | |
| | domain | | | | | | | | | |
| | containing 4 | | | | | | | | | |
| TAS2R4 | taste receptor, | 4.7 | 4 | | | NM_016944 | 7 | Plasma | 73 | 74 |
| | type 2, | | | | | | | Membrane | | |
| | member 4 | | | | | | | | | |
| GPR18 | G protein- | 4.6 | 8 | | | NM_005292; | 7 | Plasma | 75 | 76 |
| | coupled | | | | | NM_001098200 | | Membrane | | |
| | receptor 18 | | | | | | | | | |
| TAS2R3 | taste receptor, | 4.1 | 5 | | | NM_016943 | 7 | Plasma | 77 | 78 |
| | type 2, | | | | | | | Membrane | | |
| | member 3 | | | | | | | | | |
| MR1 | major | 4.0 | 5 | | | NM_001531; | 1 | Plasma | 79 | 80 |
| | histocompatibility | | | | | Q95460; | | Membrane | | |
| | complex, | | | | | U22963; | | | | |
| | class I-related | | | | | Q53GM1; | | | | |
| | | | | | | NM_001531; | | | | |
| | | | | | | Q53GM1; | | | | |
| | | | | | | U22963; | | | | |
| | | | | | | Q95460 | | | | |
| GPR34 | G protein- | 3.8 | 15 | | | NM_001097579; | 7 | Plasma | 81 | 82 |
| | coupled | | | | | NM_005300 | | Membrane | | |
| | receptor 34 | | | | | | | | | |
| NKG7 | natural killer | 3.6 | 12 | | | NM_005601 | 3 | Plasma | 9 | 10 |
| | cell group 7 | | | | | | | Membrane | | |
| | sequence | | | | | | | | | |
| KCNAB2 | potassium | 2.8 | 29 | | | NM_003636; | none | Plasma | 83 | 84 |
| | voltage-gated | | | | | NM_172130 | | Membrane | | |
| | channel, | | | | | | | | | |
| | shaker-related | | | | | | | | | |
| | subfamily, | | | | | | | | | |
| | beta member 2 | | | | | | | | | |
| KCNE3 | potassium | 2.4 | 28 | | | NM_005472 | 1 | Plasma | 85 | 86 |
| | voltage-gated | | | | | | | Membrane | | |
| | channel, Isk- | | | | | | | | | |
| | related family, | | | | | | | | | |
| | member 3 | | | | | | | | | |
| LAT2 | linker for | 2.3 | 33 | | | NM_032464; | none | Plasma | 87 | 88 |
| | activation of T | | | | | NM_032463; | | Membrane | | |
| | cells family, | | | | | NM_014146 | | | | |
| | member 2 | | | | | | | | | |
| OR52B6 | olfactory | 1.9 | 5 | | | NM_001005162 | 7 | Plasma | 11 | 12 |
| | receptor, | | | | | | | Membrane | | |
| | family 52, | | | | | | | | | |
| | subfamily B, | | | | | | | | | |
| | member 6 | | | | | | | | | |
| ADCY7 | adenylate | 1.7 | 5 | | | NM_001114 | 12 | Plasma | 13 | 14 |
| | cyclase 7 | | | | | | | Membrane | | |
| MLC1 | megalencephalic | 1.7 | 1169 | | | NM_015166; | 8 | Plasma | 89 | 90 |
| | leukoencephalopathy | | | | | NM_139202 | | Membrane | | |
| | with | | | | | | | | | |
| | subcortical | | | | | | | | | |
| | cysts 1 | | | | | | | | | |
| ENPP5 | ectonucleotide | 1.6 | 19 | | | NM_021572 | 1 | Extracellular | 91 | 92 |
| | pyrophosphatase/ | | | | | | | Space | | |
| | phosphodiesterase 5 | | | | | | | | | |
| | (putative | | | | | | | | | |
| | function) | | | | | | | | | |
| EMR2 | egf-like | 4.2 | 2 | 65.5% | 5.7% | NM_013447; | 7 | Plasma | 17 | 18 |
| | module | | | | | NM_152916; | | Membrane | | |
| | containing, | | | | | NM_152919; | | | | |
| | mucin-like, | | | | | NM_152917; | | | | |
| | hormone | | | | | NM_152920; | | | | |
| | receptor-like 2 | | | | | NM_152921; | | | | |
| | | | | | | NM_152918 | | | | |
| FLVCR1 | feline | 2.4 | 1.4 | | | NM_014053 | 12 | Plasma | 93 | 94 |
| | leukemia virus | | | | | | | Membrane | | |
| | subgroup C | | | | | | | | | |
| | cellular | | | | | | | | | |
| | receptor 1 | | | | | | | | | |
| GPR65 | G protein- | 2.8 | 18 | | | NM_003608 | 6 | Plasma | 95 | 96 |
| | coupled | | | | | | | Membrane | | |
| | receptor 65 | | | | | | | | | |
| OPN3 | opsin 3 | 2.7 | 2 | | | NM_014322; | 7 | Plasma | 97 | 98 |
| | | | | | | NM_001821 | | Membrane | | |
| TAS2R13 | taste receptor, | 4.0 | 1 | | | NM_023920 | 7 | Plasma | 99 | 100 |
| | type 2, | | | | | | | Membrane | | |
| | member 13 | | | | | | | | | |
| CLDN20 | claudin 20 | 2.0 | 1 | | | NM_001001346 | 3 | Plasma | 101 | 102 |
| | | | | | | | | Membrane | | |
| DSG2 | desmoglein 2 | 7.4 | 183 | ~50% | <1% | NM_001943 | 1 | Plasma | 15 | 16 |
| | | | | | | | | Membrane | | |
| SLC1A3 | solute carrier | 5.0 | 100 | | | NM_004172 | 7 | Plasma | 103 | 104 |
| | family 1 (glial | | | | | | | Membrane | | |
| | high affinity | | | | | | | | | |
| | glutamate | | | | | | | | | |
| | transporter), | | | | | | | | | |
| | member 3 | | | | | | | | | |
| SLC1A4 | solute carrier | 2.2 | Not done | | | NM_003038 | 9 | Plasma | 105 | 106 |
| | family 1 | | | | | | | Membrane | | |
| | (glutamate/neutral | | | | | | | | | |
| | amino acid | | | | | | | | | |
| | transporter), | | | | | | | | | |
| | member 4 | | | | | | | | | |
| CLDN10 | claudin 10 | 1.9 | 26 | | | NM_182848; | 3 | Plasma | 107 | 108 |
| | | | | | | NM_006984 | | Membrane | | |
| ADAMTS2 | ADAM | 1.7 | 75 | | | NM_014244; | none | Extracellular | 109 | 110 |
| | metallopeptidase | | | | | NM_021599 | | Space | | |
| | with | | | | | | | | | |
| | thrombospondin | | | | | | | | | |
| | type 1 | | | | | | | | | |
| | motif, 2 | | | | | | | | | |
| TBXAS1 | thromboxane | 4.7 | 33 | | | NM_001061; | 2 | Plasma | 111 | 112 |
| | A synthase 1 | | | | | NM_030984 | | Membrane | | |
| | (platelet) | | | | | | | | | |
| LAPTM5 | lysosomal | 3.5 | 5 | | | NM_006762 | | Plasma | 113 | 114 |
| | protein | | | | | | | Membrane | | |
| | transmembrane 5 | | | | | | | | | |
| VAMP8 | vesicle- | 2.7 | 3 | | negative | NM_003761 | 1 | Plasma | 115 | 116 |
| | associated | | | | | | | Membrane | | |
| | membrane | | | | | | | | | |
| | protein 8 | | | | | | | | | |
| | (endobrevin) | | | | | | | | | |
| AKAP7 | A kinase | 2.1 | 3 | | negative | NM_016377; | none | Plasma | 117 | 118 |
| | (PRKA) | | | | | NM_138633; | | Membrane | | |
| | anchor protein 7 | | | | | NM_004842 | | | | |
| SEMA3C | sema domain, | 3.6 | 1 | | | NM_006379 | none | Extracellular | 119 | 120 |
| | immunoglobulin | | | | | | | Space | | |
| | domain | | | | | | | | | |
| | (Ig), short | | | | | | | | | |
| | basic domain, | | | | | | | | | |
| | secreted, | | | | | | | | | |
| | (semaphorin) | | | | | | | | | |
| | 3C | | | | | | | | | |
| SLC38A1 | solute carrier | 8.6 | 1 | | | NM_001077484; | 11 | Plasma | 121 | 122 |
| | family 38, | | | | | Q9H2H9; | | Membrane | | |
| | member 1 | | | | | NM_030674; | | | | |
| | | | | | | Q9H2H9 | | | | |
| CD302 | CD302 | 6.8 | 3 | | | NM_002349 | 1 | Plasma | 123 | 124 |
| | molecule | | | | | | | Membrane | | |
| PLBD1 | phospholipase | 9.6 | 9 | | | NM_024829 | | Extracellular | 125 | 126 |
| | B domain | | | | | | | Space | | |
| | containing 1 | | | | | | | | | |
| LOXL3 | lysyl oxidase- | 1.5 | 4 | | | NM_032603 | | Extracellular | 127 | 128 |
| | like 3 | | | | | | | Space | | |
| FAM46C | family with | 1.9 | 8 | | | NM_017709 | | Extracellular | 129 | 130 |
| (includes | sequence | | | | | | | Space | | |
| EG: 54855) | similarity 46, | | | | | | | | | |
| | member C | | | | | | | | | |
| MFAP4 | microfibrillar- | 5.9 | 105 | | | NM_002404 | | Extracellular | 131 | 132 |
| | associated | | | | | | | Space | | |
| | protein 4 | | | | | | | | | |
| IQCB1 | IQ motif | 8.6 | 1 | | | NM_001023570; | | Extracellular | 133 | 134 |
| | containing B1 | | | | | NM_001023571 | | Space | | |
| FBN2 | fibrillin 2 | 4.0 | 2 | | | NM_001999 | | Extracellular | 135 | 136 |
| (includes | | | | | | | | Space | | |
| EG: 2201) | | | | | | | | | | |
| OGN | osteoglycin | 3.9 | 5 | | | NM_033014; | | Extracellular | 137 | 138 |
| | | | | | | NM_014057 | | Space | | |
| OMD | osteomodulin | 3.3 | 1 | | | NM_005014 | | Extracellular | 139 | 140 |
| | | | | | | | | Space | | |
| ASPN | asporin | 2.8 | 3 | | | NM_017680 | | Extracellular | 141 | 142 |
| | | | | | | | | Space | | |
| PZP | pregnancy- | 2.1 | 1 | | | NM_002864 | | Extracellular | 143 | 144 |
| | zone protein | | | | | | | Space | | |
| HSN2 | hereditary | 2.1 | NOT DONE | | | NM_213655 | | Cytoplasm | 145 | 146 |
| | sensory | | | | | | | | | |
| | neuropathy, | | | | | | | | | |
| | type II | | | | | | | | | |
| | (WNK1) | | | | | | | | | |
| SERPINI2 | serpin | 1.9 | 1 | | | NM_006217 | | Extracellular | 147 | 148 |
| | peptidase | | | | | | | Space | | |
| | inhibitor, | | | | | | | | | |
| | clade I | | | | | | | | | |
| | (pancpin), | | | | | | | | | |
| | member 2 | | | | | | | | | |
| ECM2 | extracellular | 1.8 | 1 | | | NM_001393 | | Extracellular | 149 | 150 |
| | matrix protein | | | | | | | Space | | |
| | 2, female | | | | | | | | | |
| | organ and | | | | | | | | | |
| | adipocyte | | | | | | | | | |
| | specific | | | | | | | | | |
| ERLIN1 | ER lipid raft | 1.5 | 1 | | | NM_006459; | | Plasma | 151 | 152 |
| | associated 1 | | | | | NM_001100626 | | Membrane | | |

LDA—results of low density microarray analysis, wherein a ✓ indicates significantly increased expression in EPCs.
EPC flow—results of flow cytometry showing percentage of EPCs in a population expressing the biomarker.
EC flow—results of flow cytometry showing percentage of endothelial cells in a population expressing the biomarker.
PBMC flow—results of flow cytometry showing percentage of peripheral blood monocytes (PBMCs) in a population expressing the biomarker.

### Example 5

### Detection of Protein Biomarkers of EPCs

[1154] Non-adherent CD133⁺ EPCs were isolated from umbilical cord blood using Miltenyi AutoMacsPro essentially as described in Example 2. These cells were cultured essentially as described in Example 2. Non-adherent natural EPCs were harvested at days 4 and 7. HUVECs were also prepared essentially as described in Example 2. Cells were then gently washed to remove any extraneous material while ensuring cell integrity. The carbohydrate moieties of the outer membrane protein was oxidized using 10 mM sodium periodate. Following removal of excess periodate the cells were lysed for 15 minutes in 100 mM Na Acetate pH 5.5 and 0.5% Triton-X/1% octyl-glucoside/150 mM NaCl. After removal of cell debris by centrifugation the oxidised glycoproteins were bound to beads via hydrazone coupling. The beads were extensively washed to remove any non-covalently bound cell related material. Proteins bound to the beads were reduced for 1 hour at 60° C. with 10 mM DTT followed by alkylation with 5 times molar excess of iodoacetamide. Following further washing proteins attached to the beads were digested with trypsin for 1.5 hour at 45° C. in 25 mM Tris pH 8.0. The tryptic peptides were then removed and the glycopeptides remaining attached to the beads released by cleavage of the asparagine linked carbohydrate using PNGase F enzyme over night at 37° C. Solution containing the released peptides was dried in an injection vial for mass spectrometric analysis.

[1155] The dried sample was then injected onto a HPLC (Ultimate 3000, Dionex) and fractionated by a pepmap 150 mm×150 μm column (C18 5μ) using 0.1% formic acid(aq) as A-buffer and 98% acetonitrile in 2% A-buffer as B-buffer. The peptides were eluted onto a 384 spot MALDI-MS target plate using a spotter (FC-proteineer, Bruker Daltonics, Germany). After drying the target was washed once with 10 mM ammonium phosphate buffer.

[1156] Molecular ion spectra of the 384 spots were automatically acquired and from the result a list of approximately 4000 major peptides was generated. Each of these peptides was collated into one datafile by the program WarpLC 1.2 and the most significant peak from each peptide was fragmented and analysed by MALDI-tof/tof-MS (Bruker-Daltonics, Germany). The resulting spectra were annotated and imported into Biotools 3.2 which controls the search parameters for a search using the Mascot search engine (Matrix Science, UK). The mass tolerance was set to 50 ppm for molecular ions and 0.5 Da for fragment ions.

[1157] The protein list resulting from the Mascot search was manually curated for the presence of a glycosylation site(s) and obvious miss assigned spectra.

[1158] Results of this analysis are summarised in Table 9.

TABLE 9
Summary of cell proteins identified in, on or secreted from EPCs.

| | | | Reference | | | | | | | |
|---|---|---|---|---|---|---|---|---|---|---|
| | | | Sequence | | | | | | Nucle- | Amino |
| | | | (SwissProt | | | | | Location | otide | Acid |
| | Gene | | Accession | | Fold | EPC | EC | TM | SEQ ID | SEQ |
| Protein ID | name | Protein | Number) | P-Value | Change | flow | flow | domains | NO | ID NO |
| EMB_HUMAN | EMB | Embigin | NM_198449; | 0.009503 | 6.0 | | | Plasma | 1 | 2 |
| | | precursor - | NR_003955 | | | | | Membrane 1 | | |
| | | Homo | (Q6PCB8; | | | | | | | |
| | | sapiens | B7Z6S3) | | | | | | | |
| | | (Human) | | | | | | | | |
| CELR2_HUMAN | CELSR2 | Cadherin | NM_014246 | 0.028395 | 1.73 | | | Plasma | 153 | 154 |
| | | EGF LAG | (Q9HCU4; | | | | | Membrane 7 | | |
| | | seven-pass | Q5T2Y7; | | | | | | | |
| | | G-type | Q92566) | | | | | | | |
| | | receptor 2 | | | | | | | | |
| | | precursor - | | | | | | | | |
| | | Homo | | | | | | | | |
| | | sapiens | | | | | | | | |
| | | (Human) | | | | | | | | |
| NPTN_HUMAN | NPTN | Neuroplastin | NM_012428; | 0.0233 | 2.17 | | | Plasma | 155 | 156 |
| | | OS = Homo | NM_017455 | | | | | Membrane 1 | | |
| | | sapiens | (Q9Y639; | | | | | | | |
| | | GN = NPTN | B7Z4D3; | | | | | | | |
| | | PE = 1 SV = 2 | B7ZLL2; | | | | | | | |
| | | | Q17R52; | | | | | | | |
| | | | Q59EJ9; | | | | | | | |
| | | | Q6NVX7; | | | | | | | |
| | | | Q9Y640) | | | | | | | |
| APMAP_HUMAN | C20ORF3 | Adipocyte | NM_020531 | 0.090422 | 1.53 | | | Plasma | 157 | 158 |
| | | plasma | (Q9HDC9; | | | | | Membrane 1 | | |
| | | membrane- | A8K514; | | | | | | | |
| | | associated | B4DXG1; | | | | | | | |
| | | protein - | Q6UVZ8; | | | | | | | |
| | | Homo | Q9GZS8; | | | | | | | |
| | | sapiens | Q9NUB2) | | | | | | | |
| | | (Human) | | | | | | | | |
| CLD20_HUMAN | CLDN20 | Claudin-20 | NM_001001346 | 0.023075 | 2.0 | | | Plasma | 101 | 102 |
| | | | (P56880) | | | | | Membrane 3 | | |
| GBRA3_HUMAN | GABRA3 | Gamma- | NM_000814; | 0.062762 | 2.81 | | | Plasma | 159 | 160 |
| | | aminobutyric | NM_021912 | | | | | Membrane 4 | | |
| | | acid receptor | (P34903; | | | | | | | |
| | | subunit | Q8TAF9) | | | | | | | |
| | | alpha-3 | | | | | | | | |
| DSG3_HUMAN | DSG3 | Desmoglein- | NM_001943 | 0.028143 | 7.4 | | | Plasma | 161 | 162 |
| | | 3 OS = Homo | (P32926; | | | | | Membrane 1 | | |
| | | sapiens | A8K2V2) | | | | | | | |
| | | GN = DSG3 | | | | | | | | |
| | | PE = 1 SV = 2 | | | | | | | | |
| PLXB2_HUMAN | PLXNB2 | Plexin-B2 | NM_005761 | 0.015987 | 8.6 | | | Plasma | 163 | 164 |
| | | precursor - | (O15031; | | | | | Membrane 1 | | |
| | | Homo | A6QRH0; | | | | | | | |
| | | sapiens | Q7KZU3; | | | | | | | |
| | | (Human) | Q9BSU7) | | | | | | | |
| CRCM1_HUMAN | ORAI1 | Calcium | NM_152288 | 0.070157 | 1.30 | | | Plasma | 165 | 166 |
| | | release- | (Q96D31; | | | | | Membrane 4 | | |
| | | activated | Q3MHV3; | | | | | | | |
| | | calcium | Q6DHX2; | | | | | | | |
| | | channel | Q96BP7; | | | | | | | |
| | | protein 1 | Q96K71) | | | | | | | |
| | | OS = Homo | | | | | | | | |
| | | sapiens | | | | | | | | |
| | | GN = ORAI1 | | | | | | | | |
| | | PE = 1 SV = 2 | | | | | | | | |
| DAG1_HUMAN | DAG1 | Dystroglycan | (Q14118; | | | | | Plasma | 167 | 168 |
| | | OS = Homo | A8K6M7; | | | | | Membrane 1 | | |
| | | sapiens | Q969J9) | | | | | | | |
| | | GN = DAG1 | | | | | | | | |
| | | PE = 1 SV = 2 | | | | | | | | |
| CN176_HUMAN | C14ORF176 | Transmembrane | (P0C7T8) | | | | | unknown | 169 | 170 |
| | | protein | | | | | | | | |
| | | C14orf176 | | | | | | | | |
| MPZL1_HUMAN | MPZL1 | Myelin | (O95297; | | | | | Plasma | 171 | 172 |
| | | protein zero- | B2REB9; | | | | | Membrane 1 | | |
| | | like protein 1 | Q5R332; | | | | | | | |
| | | precursor - | Q8IX11; | | | | | | | |
| | | Homo | Q9BWZ3; | | | | | | | |
| | | sapiens | Q9NYK4; | | | | | | | |
| | | (Human) | Q9UL20) | | | | | | | |
| CLD17_HUMAN | CLDN17 | Claudin-17 - | P56750; Q3MJB5; | | | | | Plasma | 173 | 174 |
| | | Homo | Q6UY37 | | | | | Membrane 3 | | |
| | | sapiens | | | | | | | | |
| | | (Human) | | | | | | | | |
| GP125_HUMAN | GPR125 | Probable G- | (Q8IWK6; | | | | | Plasma | 175 | 176 |
| | | protein | Q6UXK9; | | | | | Membrane 7 | | |
| | | coupled | Q86SQ5; | | | | | | | |
| | | receptor 125 | Q8TC55) | | | | | | | |
| | | precursor - | | | | | | | | |
| | | Homo | | | | | | | | |
| | | sapiens | | | | | | | | |
| | | (Human) | | | | | | | | |
| NICA_HUMAN | NCSTN | Nicastrin | (Q92542; | | | | negative | Plasma | 177 | 178 |
| | | precursor - | Q5T207; | | | | | Membrane 1 | | |
| | | Homo | Q86VV5) | | | | | | | |
| | | sapiens | | | | | | | | |
| | | (Human) | | | | | | | | |
| UPK1A_HUMAN | UPK1A | Uroplakin-1a | (O00322; | | | | | Plasma | 179 | 180 |
| | | | Q3KNU5; | | | | | Membrane 4 | | |
| | | | Q3KNU6) | | | | | | | |
| TEN3_HUMAN | ODZ3 | Teneurin-3 - | (Q9P273; | | | | | Plasma | 181 | 182 |
| | | Homo | Q5XUL9; | | | | | Membrane 1 | | |
| | | sapiens | Q96SY2; | | | | | | | |
| | | (Human) | Q9NV77; | | | | | | | |
| | | | Q9NVW1; | | | | | | | |
| | | | Q9NZJ2) | | | | | | | |
| DCC_HUMAN | DCC | Netrin | (P43146) | | | | | Plasma | 183 | 184 |
| | | receptor | | | | | | Membrane 1 | | |
| | | DCC | | | | | | | | |
| | | OS = Homo | | | | | | | | |
| | | sapiens | | | | | | | | |
| | | GN = DCC | | | | | | | | |
| | | PE = 1 SV = 1 | | | | | | | | |
| K0090_HUMAN | KIAA0090 | Uncharacterized | (Q8N766; | | | | | Plasma | 185 | 186 |
| | | protein | A8K6F3; | | | | | Membrane 1 | | |
| | | KIAA0090 | Q14700; | | | | | | | |
| | | precursor - | Q5TG62; | | | | | | | |
| | | Homo | Q63HL0; | | | | | | | |
| | | sapiens | Q63HL3; | | | | | | | |
| | | (Human) | Q8NBH8) | | | | | | | |
| ACCN4_HUMAN | ACCN4 | Amiloride- | (Q96FT7; | | | | | Plasma | 187 | 188 |
| | | sensitive | Q53SB7; | | | | | Membrane 1 | | |
| | | cation | Q6GMS1; | | | | | | | |
| | | channel 4 | Q6PIN9; | | | | | | | |
| | | | Q9NQA4) | | | | | | | |
| CAC1D_HUMAN | CACNA1D | Voltage- | (Q01668; | | | | | Plasma | 189 | 190 |
| | | dependent L- | Q13916; | | | | | Membrane | | |
| | | type calcium | Q13931; | | | | | 19 | | |
| | | channel | Q9UDC3) | | | | | | | |
| | | subunit | | | | | | | | |
| | | alpha-1D - | | | | | | | | |
| | | Homo | | | | | | | | |
| | | sapiens | | | | | | | | |
| | | (Human) | | | | | | | | |
| CSPG4_HUMAN | CSPG4 | Chondroitin | (Q6UVK1; | | | | | Plasma | 191 | 192 |
| | | sulfate | D3DW77; | | | | | Membrane 1 | | |
| | | proteoglycan | Q92675) | | | | | | | |
| | | 4 precursor - | | | | | | | | |
| | | Homo | | | | | | | | |
| | | sapiens | | | | | | | | |
| | | (Human) | | | | | | | | |
| DPP6_HUMAN | DPP6 | Dipeptidyl | (P42658) | | | | negative | Plasma | 193 | 194 |
| | | aminopeptidase- | | | | | | Membrane 1 | | |
| | | like | | | | | | | | |
| | | protein 6 | | | | | | | | |
| | | OS = Homo | | | | | | | | |
| | | sapiens | | | | | | | | |
| | | GN = DPP6 | | | | | | | | |
| | | PE = 1 SV = 2 | | | | | | | | |
| FAT2_HUMAN | FAT2 | Protocadherin | (Q9NYQ8; | | | | | Plasma | 195 | 196 |
| | | Fat 2 | O75091; | | | | | Membrane 1 | | |
| | | precursor - | Q9NSR7) | | | | | | | |
| | | Homo | | | | | | | | |
| | | sapiens | | | | | | | | |
| | | (Human) | | | | | | | | |
| LRP12_HUMAN | LRP12 | Low-density | (Q9Y561; | | | | | Plasma | 197 | 198 |
| | | lipoprotein | A8K137) | | | | | Membrane 1 | | |
| | | receptor- | | | | | | | | |
| | | related | | | | | | | | |
| | | protein 12 | | | | | | | | |
| | | precursor - | | | | | | | | |
| | | Homo | | | | | | | | |
| | | sapiens | | | | | | | | |
| | | (Human) | | | | | | | | |
| NPY2R_HUMAN | NPY2R | Neuropeptide | (P49146; | | | | | Plasma | 199 | 200 |
| | | Y receptor | Q13281; | | | | | Membrane | | |
| | | type 2 - | Q13457; | | | | | GPCR = 7 | | |
| | | Homo | Q4W5G7; | | | | | | | |
| | | sapiens | Q6AZZ6; | | | | | | | |
| | | (Human) | Q9UE67) | | | | | | | |
| O11H4_HUMAN | OR11H4 | Olfactory | (Q8NGC9; | | | | | Plasma | 201 | 202 |
| | | receptor | B2RNQ4; | | | | | Membrane | | |
| | | 11H4 - | Q6IF07) | | | | | GPCR = 7 | | |
| | | Homo | | | | | | | | |
| | | sapiens | | | | | | | | |
| | | (Human) | | | | | | | | |
| PCDA4_HUMAN | PCDHA4 | Protocadherin | (Q9UN74; | | | | | Plasma | 203 | 204 |
| | | alpha-4 | O75285; | | | | | Membrane 1 | | |
| | | precursor - | Q2M253) | | | | | | | |
| | | Homo | | | | | | | | |
| | | sapiens | | | | | | | | |
| | | (Human) | | | | | | | | |
| PCDC1_HUMAN | PCDHAC1 | Protocadherin | (Q9H158; | | | | | Plasma | 205 | 206 |
| | | alpha-C1 | Q9Y5F5; | | | | | Membrane 1 | | |
| | | precursor - | Q9Y5I5) | | | | | | | |
| | | Homo | | | | | | | | |
| | | sapiens | | | | | | | | |
| | | (Human) | | | | | | | | |
| RHBD2_HUMAN | RHBDD2 | Rhomboid | (Q6NTF9; | | | | | Plasma | 207 | 208 |
| | | domain- | Q7L534; | | | | | Membrane 5 | | |
| | | containing | Q9H5W6; | | | | | | | |
| | | protein 2 - | Q9UDT2) | | | | | | | |
| | | Homo | | | | | | | | |
| | | sapiens | | | | | | | | |
| | | (Human) | | | | | | | | |
| SCN5A_HUMAN | SCN5A | Sodium | (Q14524; | | | | | Plasma | 209 | 210 |
| | | channel | A5H1P8 | | | | | Membrane | | |
| | | protein type | A6N922; | | | | | 22 | | |
| | | 5 subunit | A6N923; | | | | | | | |
| | | alpha | B2RTU0; | | | | | | | |
| | | OS = Homo | Q75RX9; | | | | | | | |
| | | sapiens | Q75RY0; | | | | | | | |
| | | GN = SCN5A | Q86UR3; | | | | | | | |
| | | PE = 1 SV = 2 | Q8IZC9; | | | | | | | |
| | | | Q96J69) | | | | | | | |
| SERC5_HUMAN | SERINC5 | Serine | (Q86VE9; | | | | | Plasma | 211 | 212 |
| | | incorporator | Q495A4; | | | | | Membrane 8 | | |
| | | 5 OS = Homo | Q495A6) | | | | | | | |
| | | sapiens | | | | | | | | |
| | | GN = SERINC5 | | | | | | | | |
| | | PE = 2 | | | | | | | | |
| | | SV = 1 | | | | | | | | |
| S12A1_HUMAN | SLC12A1 | Solute | (Q13621; | | | | | Plasma | 213 | 214 |
| | | carrier | A8JYA2) | | | | | Membrane | | |
| | | family 12 | | | | | | 11 | | |
| | | member 1 | | | | | | | | |
| | | OS = Homo | | | | | | | | |
| | | sapiens | | | | | | | | |
| | | GN = SLC12A1 | | | | | | | | |
| | | PE = 1 | | | | | | | | |
| | | SV = 2 | | | | | | | | |
| PCFT_HUMAN | SLC46A1 | Proton- | (Q96NT5; | | | | | Plasma | 215 | 216 |
| | | coupled | Q1HE20; | | | | | Membrane | | |
| | | folate | Q86T92; | | | | | 11 | | |
| | | transporter | Q8TEG3; | | | | | | | |
| | | | Q96FL0) | | | | | | | |
| SO1B1_HUMAN | SLCO1B1 | Solute | (Q9Y6L6; | | | | | Plasma | 217 | 218 |
| | | carrier | B2R7G2; | | | | | Membrane | | |
| | | organic | Q9NQ37; | | | | | 12 | | |
| | | anion | Q9UBF3; | | | | | | | |
| | | transporter | Q9UH89) | | | | | | | |
| | | family | | | | | | | | |
| | | member 1B1 | | | | | | | | |
| ANO2_HUMAN | ANO2 | Anoctamin-2 | (Q9NQ90; | | | | | Unknown 7 | 219 | 220 |
| | | OS = Homo | C4N787; | | | | | | | |
| | | sapiens | Q9H847) | | | | | | | |
| | | GN = ANO2 | | | | | | | | |
| | | PE = 1 SV = 2 | | | | | | | | |
| ABCAC_HUMAN | ABCA12 | ATP-binding | (Q86UK0; | | | | | Plasma | 221 | 222 |
| | | cassette sub- | Q53QE2; | | | | | Membrane | | |
| | | family A | Q53S55; | | | | | 12 | | |
| | | member 12 | Q8IZW6; | | | | | | | |
| | | OS = Homo | Q96JT3; | | | | | | | |
| | | sapiens | Q9Y4M5) | | | | | | | |
| | | GN = ABCA1 | | | | | | | | |
| | | 2 PE = 1 | | | | | | | | |
| | | SV = 3 | | | | | | | | |
| CBPM_HUMAN | CPM | Carboxypeptidase M | (P14384; | | | | | Plasma | 223 | 224 |
| | | precursor - | B2R800; | | | | | Membrane 1 | | |
| | | Homo | Q9H2K9) | | | | | | | |
| | | sapiens | | | | | | | | |
| | | (Human) | | | | | | | | |
| AAAT_HUMAN | SLC1A5 | Neutral | (Q15758; | | | | | Plasma | 225 | 226 |
| | | amino acid | A8K9H5; | | | | | Membrane 9 | | |
| | | transporter | D0EYG6; | | | | | | | |
| | | B(0) - Homo | O95720; | | | | | | | |
| | | sapiens | Q96RL9; | | | | | | | |
| | | (Human) | Q9BWQ3; | | | | | | | |
| | | | Q9UNP2) | | | | | | | |
| PK2L1_HUMAN | PKD2L1 | Polycystic | (Q9P0L9; | | | | negative | Plasma | 227 | 228 |
| | | kidney | O75972; | | | | | Membrane 5 | | |
| | | disease 2- | Q5W039; | | | | | | | |
| | | like 1 protein - | Q9UP35; | | | | | | | |
| | | Homo | Q9UPA2) | | | | | | | |
| | | sapiens | | | | | | | | |
| | | (Human) | | | | | | | | |
| AT10A_HUMAN | ATP10A | Probable | (O60312; | | | | | Plasma | 229 | 230 |
| | | phospholipid- | Q969I4) | | | | | Membrane | | |
| | | transporting | | | | | | 10 | | |
| | | ATPase VA - | | | | | | | | |
| | | Homo | | | | | | | | |
| | | sapiens | | | | | | | | |
| | | (Human) | | | | | | | | |
| ACHG_HUMAN | CHRNG | Acetylcholine | (P07510; | | | | | Plasma | 231 | 232 |
| | | receptor | B3KWM8; | | | | | Membrane 4 | | |
| | | subunit | Q53RG2) | | | | | | | |
| | | gamma | | | | | | | | |
| | | precursor - | | | | | | | | |
| | | Homo | | | | | | | | |
| | | sapiens | | | | | | | | |
| | | (Human) | | | | | | | | |
| INSRR_HUMAN | INSRR | Insulin | (P14616; | | | | negative | Plasma | 233 | 234 |
| | | receptor- | O60724; | | | | | Membrane 1 | | |
| | | related | Q5VZS3) | | | | | | | |
| | | protein | | | | | | | | |
| | | precursor - | | | | | | | | |
| | | Homo | | | | | | | | |
| | | sapiens | | | | | | | | |
| | | (Human) | | | | | | | | |
| SIRPBL_HUMAN | SIRPB1 | signal- | NM_006065 | | | | negative | Plasma | 331 | 332 |
| | | regulatory | | | | | | membrane 1 | | |
| | | protein beta 1 | | | | | | | | |
| LOXL4_HUMAN | LOXL4 | lysyl | NM_032211 | | | | negative | Extracellular | 337 | 338 |
| | | oxidase-like 4 | | | | | | space | | |
| CAC1B_HUMAN | CACNA1B | Voltage- | (Q00975; | | | | | Plasma | 235 | 236 |
| | | dependent | B1AQK5) | | | | | Membrane | | |
| | | N-type | | | | | | 22 | | |
| | | calcium | | | | | | | | |
| | | channel | | | | | | | | |
| | | subunit | | | | | | | | |
| | | alpha-1B - | | | | | | | | |
| | | Homo | | | | | | | | |
| | | sapiens | | | | | | | | |
| | | (Human) | | | | | | | | |
| ADAM0_HUMAN | ADAM10 | Disintegrin | NM_001110 | | | | | | 329 | 330 |
| | | and | | | | | | | | |
| | | metalloproteinase | | | | | | | | |
| | | domain- | | | | | | | | |
| | | containing | | | | | | | | |
| | | protein 10 | | | | | | | | |
| CSF2RA_HUMAN | CSF2RA | GM-CSF | NM_006140, | | | | | | 333 | 334 |
| | | receptor | NM_172245, | | | | | | | |
| | | subunit alpha | NM_172246, | | | | | | | |
| | | precursor | NM_172247, | | | | | | | |
| | | | NM_172249, | | | | | | | |
| | | | NM_001161529, | | | | | | | |
| | | | NM_001161530, | | | | | | | |
| | | | NM_001161531, | | | | | | | |
| | | | NR_027760, | | | | | | | |
| | | | NM_001161532 | | | | | | | |
| EVI5_HUMAN | EVI5 | Ecotropic | NM_005665, | | | | | | 335 | 336 |
| | | viral | Q59FE7 | | | | | | | |
| | | integration 5 | | | | | | | | |
| LRRC33_HUMAN | LRRC33 | sapiens | NM_198565, | | | | | | 339 | 340 |
| | | Leucine rich | Q86YC3 | | | | | | | |
| | | containing | | | | | | | | |
| | | 33 | | | | | | | | |

### Example 6

### Role for DSG2 in Tube Formation and Angiogenesis

### 6.1 Materials and Methods

### Matrigel Assays

[1159] In vitro tube formation of HUVEC and DSG2 positive (C32) or DSG2 negative (MM200) melanoma cells (used as a model for EPCs) was assessed using a Matrigel matrix. HUVEC were stained with 10 μg/ml DiI-Ac-LDL (Biomedical Technologies, Stoughton, Mass.) for 4 hours at 37° C., 5% CO₂, washed once and incubated overnight at 37° C., 5% CO₂, after the addition of fresh media. C32 or MM200 were stained with 0.5 μM CFDA-SE (Invitrogen) in 0.1% FCS in PBS for 10 minutes. Labelled cells were incubated in fresh media for 30 minutes and then washed to ensure the residual CFDA-SE was completely removed. Fresh media was then added and the labelled cells were incubated overnight at 37° C., 5% CO₂. The next day, 12 μl Matrigel (BD Biosciences) was added to wells in a pre-warmed ibiTreat Angiogenesis μ-slide (Ibidi, Munich, Germany) and incubated at 37° C. for ≧30 minutes. Labelled cells were seeded together in Matrigel at a cell density of 1×10⁴ HUVEC or 0.7×10⁴ HUVEC and 0.5×10⁴ C32 or MM200 per well, in duplicate. Tube formation was monitored regularly and fluorescent and phase contrast images were captured using an IX81 microscope (Olympus) with 10×/0.4NA obj and a Hamamatsu Orca-ER camera after 6 hours. Fluorescence images were acquired using CellR software (Olympus Soft Imaging System).

### Small Interfering RNA Transfection

[1160] Using the manufacturer's protocol, DSG2 siRNA or scrambled control siRNA (1 nM, OriGene, Rockville, Md., USA) were transfected into DSG2 expressing cells (eg C32 cells) using Lipofectamine RNAiMAX (Invitrogen, Carlsbad, Calif., USA) in Opti-MEM medium (Invitrogen) when cells were at 30-40% confluency. The cells were then incubate for 24-48 hrs (for assessment of gene expression by qPCR) or 72 hrs (for assessment of protein expression by flow cytometry or function).

### Tissue Staining

[1161] Human Tissue Array (T8234700-2) was purchased from Biochain (Hayward, Calif., USA) and following epitope retrieval the cores were stained with the mouse anti-human DSG2 mAb (1/50, clone 3G132, Abcam, Cambridge, Mass., USA) overnight at 4° C. prior to washing, peroxidise block, washing, incubation with anti-mouse-HRP (Vector Labs Impress), 30 min at room temperature, washing, incubation with DAB chromogen, washing and haematoxylin counter-stain. An adapted method, using an alkaline phosphatase/red chromagen system for detection of DSG2 in mouse melanoma (FIG. 12) was used as the natural pigmentation of melanocytes can interfere with detection using a brown chromagen.

### 6.2 Results

[1162] FIG. 6 shows that some melanoma cells express DSG2 on their cell surface. For example, melanoma cell line C32 expresses DSG2, whereas MM200 cells do not. Based on these data, C32 cells and MM200 were used for further experiments analyzing the role for DSG2 in tube formation. In some experiments, C32 cells were co-cultured with HUVECs in Matrigel®. Within about 7 hours after seeding cells formed tube-like structures that comprised both C32 melanoma cells and HUVECs, suggesting that these cells may contribute to tube formation in vitro and in vivo.

[1163] FIG. 7 shows that results of co-culturing HUVECs with C32 cells or MM200 cells in Matrigel®. As shown, culturing C32 (DSG2⁺) cells with HUVECs results in an increased number of tubes compared to HUVECs cultured alone or in the presence of MM200 cells. In contrast, culturing MM200 (DSG⁻) cells with HUVECs did not enhance tube formation in vitro.

[1164] To further study the effect of DSG2 in tube formation, experiments were conducted in which DSG2 expression was knocked down suing siRNA. As shown in FIG. 8, siRNA targeting DSG2 can reduce DSG2 expression at the mRNA and protein level. FIG. 9 shows that when DSG2 expression is knocked-down in C32 cells, the amount of tubes formed when the cells were cultured in the presence of HUVECs in Matrigel® was dramatically reduced.

[1165] DSG2 expression was also assessed in vivo, and FIG. 10 shows that this protein is expressed on the vasculatrure of human tissue (ovary in this case). DSG2 was also shown to be expressed by melnocytes in melonomas.

[1166] FIG. 11 also shows that DSG2 is expressed on freshly isolated bone marrow cells from mouse, indicating a potential source and method for isolating EPCs based on DSG2 expression.

[1167] DSG2 was also identified on melanoma cells in a spontaneous model of this condition (Tyr-Cre+:Braf^{V600E/+};Pten^{del/del}).

### Example 7

### Expansion of EPCs

[1168] CD133⁺ cells were isolated from human umbilical cord blood as previously described prior to culturing at ˜7.5×10⁵ cells/ml in StemSpan media (Stem Cell Technologies, Vancouver, BC, Canada) in BD tissue culture plates (BD BioSciences, San Francisco, Calif., USA) for up to 7 days.

[1169] As shown in FIG. 13A, CD133⁺ EPCs could be isolated and cultured to expand the population. Even after seven days expansion the EPCs in the cultures expressed DSG2 or EMR2.

### Example 8

### Production of Monoclonal Antibodies

[1170] A monoclonal antibody that specifically binds to a protein set forth in one or more of Tables 1-6 is produced using methods known in the art. Briefly, a recombinant protein or a cell expressing said protein is administered to female Balb/C mice. Initially mice are sensitized by intraperitoneal injection of an adjuvant. Three boosts of the polypeptide or cells are administered at about 2, 5.5 and 6.5 months post initial sensitization. The first of these boosts is a subcutaneous injection while the remaining are administered by intraperitoneal injection. The final boost is administered 3 days prior to fusion.

[1171] The splenocytes of one of the immunized mice is fused to suitable myeloma cells, e.g., X63-Ag8.653 mouse myeloma cells, e.g., using PEG 1500. Following fusion, cells are incubated at 37° C. for 1 hour in heat inactivated fetal bovine serum. Fused cells are then transferred to normal medium and incubated overnight at 37° C. with 10% CO₂. The following day cells are plated using medium that has been supplemented with macrophage culture supernatants.

[1172] Two weeks after fusion, hybridoma cells are screened for antibody production by solid phase ELISA assay. Standard microtiter plates are coated with recombinant protein. Plates are then blocked, washed and then the test samples (i.e. supernatant from the fused cells) are added, in addition to control samples, (i.e. supernatant from an unfused cell). Antigen-antibody binding is detected by incubating the plates with anti-mouse or anti-human HRP conjugate (Jackson ImmunoResearch Laboratories) and 2,2′-azino-bis(3-ethylbenzthiazoline-6-sulphonic acid) (ABTS) peroxidase substrate system (Vector Laboratories, Burlingame, Calif. 94010, USA). Absorbance is read on an automatic plate reader at a wavelength of 405 nm.

[1173] Any colonies that are identified as positive by these screens continue to be grown and screened for several further weeks. Stable colonies are then isolated and stored at −80° C.

[1174] Positive stable hybridomas are then cloned by growing in culture for a short period of time and diluting the cells to a final concentration of 0.1 cells/well of a 96 well tissue culture plate. These clones are then screened using the previously described assay. This procedure is then repeated in order to ensure the purity of the clone.

[1175] Four different dilutions, 5 cells/well, 2 cells/well, 1 cell/well, 0.5 cells/well of the primary clone are prepared in 96-wells microtiter plates to start the secondary cloning. Cells are diluted in tissue culture media. To determine clones that antibodies that bind the antigen, supernatants from individual wells of the 0.5 or 1 cells/well microtiter plate are withdrawn after two weeks of growth and tested for the presence of antibody by ELISA assay as described above.

[1176] All positive clones are then adapted and expanded. A specific antibody is purified by Protein A affinity chromatography from the cell culture supernatant of cell culture.

[1177] The titer of the antibodies produced using this method are determined, e.g., using the Easy Titer kit available from Pierce (Rockford, Ill., USA). This kit utilizes beads that specifically bind mouse antibodies, and following binding these beads aggregate and no longer absorb light to the same degree as unassociated beads. Accordingly, the amount of an antibody in the supernatant of a hybridoma is assessed by comparing the OD measurement obtained from this sample to the amount detected in a standard, such as for example mouse IgG.

[1178] The specificity of the monoclonal antibody is then determined using Western blot analysis.

### Example 9

### Determining the Level of EPCs in a Biological Sample

[1179] Monoclonal antibodies essentially as described in Example 8 and/or commercially available antibodies, e.g., for sources described herein are used in the production of a two-site ELISA to determine the level of a protein expressed on EPCs in a biological sample.

[1180] Generally this method comprises capturing EPCs with a monoclonal antibody against one protein described herein and detecting those cells with an antibody against a different protein or lysing cells and capturing with an antibody against one epitope in a protein and detecting with an antibody against a different epitope against the same protein.

[1181] A capture antibody absorbed to a microtiter plate at about 20° C. for about 16 hours. Plates are then washed and blocked.

[1182] A test sample or a control sample comprising a known amount of EPCs or protein is contacted to the immobilized protein. A further control is cord blood derived sorted EPC (e.g., isolated based on expression of CD34 and/or VEGFR2)

[1183] The detection monoclonal antibody is conjugated to, e.g., HRP using an HRP conjugation kit (e.g., Alpha Diagnostics International, Inc., San Antonio, Tex., USA).

[1184] Following washing of the microtiter plates, the HRP conjugated monoclonal antibody is added to each well of the plate and incubated. Plates are then washed and ABTS (Sigma Aldrich, Sydney, Australia) is added to each well. Reactions are stopped after an appropriate time, e.g., approximately 20 minutes. Absorbance values are measured at 415 nm.

[1185] The amount of absorbance detected in negative control wells (cells or protein) is subtracted from the absorbance of each other well to determine the amount of detection antibody bound.

[1186] The amount of EPCs or protein is also assessed in normal and/or healthy subjects and/or subjects known to suffer from, e.g., rheumatoid arthritis. Samples use include, for example, buffy coat fraction. In this manner, an ELISA is produced to diagnose/prognose an EPC-associated condition, e.g., rheumatoid arthritis.

### Example 10

### Enumeration of EPCs

[1187] Monoclonal antibodies as described in Example 8 are labeled with a fluorophore using standard techniques.

[1188] Peripheral blood mononuclear cells, umbilical cord or bone marrow are resuspended in PBS in an optimally pre-titered cocktail of antibodies and incubated for about 20 minutes on ice. Labeled cells are washed in excess PBS and resuspended at about 5−10×10⁶ cells/mL and held on ice for flow cytometric analysis and sorting. Propidium iodide (PI; about 1 μg/mL) or Trypan Blue (about 0.2%), is used as a viability dye for exclusion of non-viable cells. FACS is performed using standard methods.

### Example 11

### EPC Transplantation to Models of Ischemia

[1189] Athymic nude mice or rats age 8-10 wk are anesthetized with 160 mg/kg pentobarbital (or equivalent anaesthetic) intraperitoneally for operative resection of one femoral artery or coronary artery, and subsequently for perfusion imaging. Immediately before sacrifice, rodents are injected with an overdose of pentobarbital (or equivalent anaesthetic).

[1190] The impact of administration of EPCs isolated as described in Example 10 on therapeutic neovascularization is investigated in a murine model of hindlimb ischemia or a rat model of acute mayocardial infarction. One day after operative excision of one femoral or coronary artery, athymic nude mice or rats, respectively, in which angiogenesis is characteristically impaired, receive an intracardiac injection of about 5×10⁵ culture-expanded EPCs. Two control groups are identically injected with either human vascular ECs (HVECs), harvested at 80-90% confluence, or media from the culture plates used for human (h)EPC ex vivo expansion.

[1191] For the study of EPC tracking, cells are marked with a fluorescent dye, e.g., carbocyanine DiI dye (Molecular Probes). Before cellular transplantation, cells in suspension are washed with PBS and incubated with the dye for 5 min at 37° C. and 15 min at 4° C. After two washing steps in PBS, the cells are resuspended in medium. Rodents receive dye-labeled EPCs at a total concentration of about 5×10⁵ to 10⁷ cells. Before sacrifice, a subgroup of rodents receive an intracardiac injection of either 50 μg of Bandeiraea simplicifolia lectin I (BS I; Vector Laboratories) or UEA-1 (Sigma).

[1192] Laser Doppler perfusion imaging (Moor Instrument, Wilmington, Del.) is used to record serial blood flow measurements over the course of 4 weeks postoperatively. For myocardial infarct model, magnetic resonance imaging (MRI) is used to record blood flow measurements over the course of 4 weeks postoperatively

[1193] Tissue sections from the lower calf muscles of ischemic and healthy limbs or hearts are harvested on days 3, 7, 14, and 28. Tissue from other organs and the healthy hindlimb are also examined for incorporation of EPCs. For immunohistochemistry, tissues are embedded in OCT compound (Miles Scientific, Elkhardt, Ind.) and snap frozen in liquid nitrogen. Frozen sections of 6-μm thickness are mounted on glass slides, air-dried for 1 h, and counterstained with biotinylated antibodies to UEA-1, mouse and human CD31 (platelet/endothelial cell adhesion molecule-1 (PECAM-1); Dako). Sections from other organs, including liver and spleen, are also examined for incorporation of hEPCs. The extent of neovascularization is assessed by measuring capillary density in light microscopic sections of muscles retrieved from ischemic mouse hindlimbs or the heart. The entire infrapatellar segment of each limb or the heart is examined. Sections were stained for alkaline phosphatase with indoxyl-tetrazolium and counterstained with eosin to detect capillary ECs.

### Example 12

### Inhibition of Angiogenesis

[1194] A mouse model of angiogenesis is produced essentially as described in Hoffmann et al. (1997). Briefly, sodium alginate of low viscosity and FITC-dextran with an average Mr of 150,000 is purchased from Sigma. FITC-dextran is dissolved in saline to a final concentration of 1%. Fluorescent microspheres with a size of 1 μm are obtained from Molecular Probes Europe (Leiden, Netherland). Cancer cells lines are also obtained, e.g., the murine Lewis lung carcinoma cell line LL2, the murine lymphoma line EL4, the murine myeloma line, B16, the human renal carcinoma cell line Caki-1, and the human renal carcinoma cell line Caki-2 are available from ATCC.

[1195] Sodium alginate of low viscosity is dissolved in sterile saline to a final concentration of 1.5%. Tumor cells are harvested from cell culture at 60-80% confluence. After centrifugation, the tumor cell pellet is directly resuspended with the alginate solution to the desired cell number and thereafter placed into a reservoir. Droplets containing tumor cells are produced by extrusion of the alginate solution through a 12-gauge cannula. The tumor cell alginate solution is dropped into a swirling bath of 80 mM CaCl₂. The calcium ions cause immediate gelling of each droplet by an exchange of sodium from the alginate. The size of the beads is minimized by a laminar air flow along the cannula. After incubation in the CaCl₂ bath for an additional 30 min, the beads are washed twice with buffer, centrifuged, and prepared for injection.

[1196] C57B16 mice or nude mice are injected subcutaneously with 0.1 ml of alginate beads containing tumor cells into the upper third of the back. Control mice are implanted with 0.1 ml of alginate beads without tumor cells. At the end of the experiment, 0.2 ml of 1% FITC-dextran solution (100 mg/kg) is injected intravenously (i.v.) into the lateral tail vein of mice.

[1197] Alginate implants are rapidly removed 20 mm after FITC-dextran injection and weighed, and after disection of the implant capsula, alginate beads are transferred to tubes containing 2 ml of saline. The tubes are mixed by vortexing for 20 s and centrifuged (3 min; 1000×g). After dilution (1:1), the fluorescence of the supernatant is measured.

[1198] Microspheres labeled with a fluorescent yellow-green dye at a size of 1 μm are used as indicated by the manufacturer. An aliquot of microspheres is injected into the lateral tail vein of mice (7×10⁹ microspheres/0.2 ml). Alginate implants are removed from the animals 20 min after injection of the microsphere solution and incubated with 2 ml of 2-ethoxyethylacetate for at least 24 hr to release the fluorescent dye from the disintegrated polystyrene latex membrane. The fluorescence of the samples is measured by excitation at 490 nm and emission at 506 nm.

[1199] Mice are injected i.v. with 0.2 ml of 1% FITC-dextran solution (100 mg/kg), and blood samples are taken at 10, 20, and 40 min post-injection. Heparinized blood samples are vortexed and centrifuged, and the fluorescence of the plasma is measured with a fluorescence spectrophotometer by excitation at 492 nm and emission at 515 nm. The amount of FITC-dextran within alginate implants is determined from the incubation supernatant. The corresponding blood volume of alginate implant is calculated using the following formula: blood volume (pi/alginate implant)=(FITC-dextran/alginate implant)/(FITC-dextran/μl blood).

[1200] C57BL/6 mice bearing implants encapsulating cancer cells are also treated with test antibodies from day 2 until day 10 after alginate implantation.

[1201] The assays described above permit both histological and quantitative assessment of angiogenesis induced by tumors in the presence of antibodies of the disclosure.

### Example 13

### Treatment of Myocardial Infarction

[1202] Subjects diagnosed with acute ST segment myocardial infarction (STEMI) and a left ventricular ejection fraction (n LVEF) ≦50% as determined by echocardiography are enrolled. Subjects are enrolled randomly as controls (n=15), receiving the standard of care, or assigned to the open-label cell therapy group (n=15) from whom 100 ml blood is collected. A monoclonal antibody that binds to a protein described in Table 1, such as a monoclonal antibody to DSG2, is used to isolate EPCs prior to expansion for 72 h. Nuclear-tracer cell labeling can be employed for high-sensitivity in vivo imaging of the transplanted cells. For example, cells can be labelled with 99 mTc-extametazime (110 MBq), a lipophilic compound that turns hydrophilic after crossing the cell membrane and remains intracellular during cell tracking. The cells are then reinfused proximal to the infarct-related artery. Whole-body planar (static) scan and cardiac tomographic (SPECT) images are acquired 60 min after cell transfer to validate cell delivery. All subjects have serial electrocardiograms for 24 hours, measurements of cardiac biomarkers once a month for 3 months, twice-daily temperature measurements for 1 month echocardiograms and MRI at discharge and once a month for 3 months.

### Example 14

### Treatment of Melanoma

[1203] Subjects diagnosed with solid melanoma tumours confirmed histologically to be refractory to standard therapy or for which standard or curative therapy does not exist life expectancy of 3 months or longer, absence of known progressing or unstable brain metastases, and adequate hematologic, hepatic, and renal function are enrolled. Subjects are enrolled randomly as controls (n=32), receiving the standard of care, or assigned to antibody treatment group (n=32) from whom 10 ml blood is collected. A monoclonal antibody that binds to a protein described in Table 1, such as a monoclonal antibody to DSG2, is used to enumerate the circulating EPCs prior to treatment. The antibody will be administered biweekly for 12 months. Safety evaluations are conducted at baseline, day 8, day 15, day 29, and every 4 weeks thereafter. These evaluations included a physical examination, electrocardiography, laboratory studies that included a complete blood count, clinical chemical testing, and urinalysis. Patients undergo dermatologic evaluations at baseline and every 2 months during the study; and computed tomographic (CT) scans of the chest are analyzed for the appearance of new lesions suggestive of a primary cancer. CT studies are performed at 8-week intervals during therapy in all patients. The findings are judged according to the Response Evaluation Criteria in Solid Tumours (RECIST).

### Example 15

### Treatment of Diabetes

[1204] Subjects diagnosed with type 1 diabetes and a history of severe hypoglycemia and metabolic instability are enrolled. Subjects are enrolled randomly as controls (n=7), receiving the standard of care of islet transplantation alone, or assigned to the cell therapy group (n=7) undergoing islet transplantation in conjunction with EPC co-transplantation. 100 ml blood is collected and a monoclonal antibody that binds to a protein described in Table 1, such as a monoclonal antibody to DSG2, is used to isolate the EPCs prior to expansion for 72 h. Nuclear-tracer cell labeling may be employed for high-sensitivity in vivo imaging of the transplanted cells, e.g., as described in Example 11).

[1205] Islet preparations with more than 4000 islet equivalents per kilogram of the recipient's body weight in a packed-tissue volume of less than 10 ml are injected into the portal vein under fluoroscopic guidance. Portal venous pressure is measured at base line and after islet infusion. The final islet/EPC preparation (ratio of about 2:1) is suspended in 120 ml of medium that contains 500 U of heparin and 20 percent human albumin and is infused over a period of five minutes. Doppler ultrasonography of the portal vein and liver function tests are performed within 24 hours after transplantation. MRI is also performed within 24 hours after transplantation and once a month for 12 months to identify labelled EPCs.

### REFERENCES

[1206] Air, Proc. Natl. Acad. Sci. USA 78: 7639-7643, 1981;
[1207] Andersson-Engels et al., Phys. Med. Biol, 42:815-824, 1997;
[1208] Arenkov et al., Anal. Biochem. 278:123-131, 2000;
[1209] Asahara et al., Science, 275: 964-967, 1997;
[1210] Audibert et al., Nature 289: 543, 1981;
[1211] F. M. Ausubel et al., (editors), Current Protocols in Molecular Biology, Greene Pub. Associates and Wiley-Interscience (1988, including all updates until present);
[1212] Avouac et al., Joint Bone Spine, 75: 131-137, 2008;
[1213] Bagley et al., Cancer Res 63: 5866, 2003;
[1214] Barnes et al., Anal. Biochem., 102: 255, 1980;
[1215] Beachey, Adv. Exp. Med. Biol., 185: 193, 1985;
[1216] Becchi et al., Int. J. Immunopharmacol., 21: 697-705, 2008;
[1217] Bendele J. Musculoskel. Neuron. Interact., 1(4): 377-385, 2001;
[1218] Bengtsson and Bengtsson BMC Bioinformatics, 7: 96, 2006;
[1219] Bengtsson and Hossjer BMC Bioinformatics, 7: 100, 2006;
[1220] Benjamin, et al., Journal of the Royal Statistical Society Series B, 57: 289-300, 1995;
[1221] Beaucage, et al., Tetrahedron Letters, 22: 1859-1862, 1981;
[1222] Berger and Kimmel, Guide to Molecular Cloning Techniques, Methods in Enzymology volume 152 Academic Press, Inc., San Diego, Calif.;
[1223] Berkner et al., BioTechniques, 6: 616, 1988;
[1224] Bolstad et al., Bioinformatics (Oxford, England), 19: 185-193, 2003;
[1225] Bresatz et al., Immunol. Methods, 327: 53-62, 2007;
[1226] Bernhard et al., Science, 245: 301-304, 1989;
[1227] Bhattacharya-Chatterjee et al., J of Immunospecificity. 141: 1398-1403, 1986;
[1228] Boerner et al., J Immunol, 147:86-95, 1991;
[1229] Bonder et al., Blood, 113(9):2108-17, 2009;
[1230] Bradl and Linington Brain Pathol., 6:303-311, 1996;
[1231] Brennan et al., Science, 229: 81 1985;
[1232] Bresslauer et al., Proc. Natl. Acad. Sci. USA, 83: 3746-3750, 1986;
[1233] Brown (editor), Essential Molecular Biology: A Practical Approach, Volumes 1 and 2, IRL Press (1991);
[1234] Bzik et al., Virology, 155: 322-333, 1986;
[1235] Carmeliet et al., J. Pathol., 190: 387-405, 2000;
[1236] Caron et al., J. Exp Med., 176: 191-1 195 1992;
[1237] Carter et al., Bio/Technology, 10: 163-167, 1992;
[1238] Caruthers, M. H., et al., “Methods in Enzymology,” Vol. 154, pp. 287-314 (1988);
[1239] Chen and Okayama, Mol. Cell. Biol., 7: 2745-2752, 1987;
[1240] Chen et al., Nature, 446: 203-207, 2007;
[1241] Chothia and Lesk, J. Mol. Biol., 196: 901-917, 1987;
[1242] J. E. Coligan et al. (editors) Current Protocols in Immunology, John Wiley & Sons (including all updates until present);
[1243] Cima, et al., Biotechnol. Bioeng., 38:145 1991;
[1244] Cohen et al., Hum. Gene Ther., 10: 2701-2707, 1999;
[1245] Cole et al., Monoclonal Antibodies and Cancer Therapy, Alan R. Liss, p. 77 (1985);
[1246] Collins et al., Proc. Natl. Acad. Sci. USA, 11: 7683, 1984;
[1247] Couffinhal et al., Am. J. Pathol., 152: 1667-1679, 1998;
[1248] Cunningham et al., Science, 244: 1081-1085 1989;
[1249] Cuello (editor), Immunohistochemistry, John Wiley and Sons, ASIN 0471900524 (1984);
[1250] Dai et al., J. Bioinform. Comput. Biol. 1: 627-645, 2004;
[1251] Denny et al., Blood, 110: 2907-2915, 2007;
[1252] Devereaux et al., Nucl. Acids Res., 12, 387-395, 1984;
[1253] Dieffenbach and Dveksler (editors) PCR Primer: A Laboratory Manual, Cold Spring Harbour Laboratories, NY, (1995);
[1254] Ding and Triggle, Vascular and Risk Management, 1: 55-71, 2005;
[1255] Edelson, The Cancer Journal, 4: 62, 1998;
[1256] Egan et al., Rheumatol., 47: 1484-1488, 2008;
[1257] Egholm et al., Am. Chem. Soc., 114: 1895, 1992;
[1258] Egholm et al., Nature, 365: 566, 1993;
[1259] Emini et al., Nature, 304: 699, 1983;
[1260] Estin et al., J Natl. Cancer Inst., 81: 445-446, 1989;
[1261] Fecheimer et al., Proc. Natl. Acad. Sci. USA, 84: 8463-8467, 1987;
[1262] Feizi, Nature, 314: 53-57: 1985;
[1263] Flotte et al., J. Biol. Chem., 268: 3781-3790, 1993;
[1264] Folkman et al., N. Engl., J. Med., 285: 1182-1186, 1971;
[1265] Foon et al., Proc. Am. Soc. Clin. Oncol., 13: 294, 1994;
[1266] Fraley et al., Proc. Natl. Acad. Sci. USA, 76: 3348-3352, 1979;
[1267] Frangioni, Curr. Opin. Chem. Biol, 7: 626-634, 2003;
[1268] Gait (editor) Oligonucleotide Synthesis: A Practical Approach, IRL Press, Oxford (1984);
[1269] Gautier, et al., Bioinformatics., 20: 307-315, 2004;
[1270] Gazzano-Santoro et al., J. Immunol. Methods 202: 163 (1996);
[1271] Gefter et al., Somatic Cell Genet., 3: 231-236, 1977;
[1272] Ghetie et al., Blood, 83: 1329-1336, 1994;
[1273] Gentleman et al., Genome Biol. 5: R80, 2004;
[1274] Gilligan et al., Anal Chem., 74: 2041-2047, 2002;
[1275] Glover and Hames (editors), DNA Cloning: A Practical Approach, Volumes 1-4, IRL Press (1995 and 1996);
[1276] Gonzales-Scarano et al., Virology, 120: 42, 1982;
[1277] Goodman et al., (editors) Goodman and Gilman's The Pharmacological Basis of Therapeutics, 8th Ed., Macmillan Publishing Co. (1990);
[1278] Gopal, Mol. Cell. Biol., 5: 1188-1190, 1985;
[1279] Graham et al., Gen Virol., 36: 59, 1977;
[1280] Graham and Van Der Eb, Virology, 52: 456-467, 1973;
[1281] Grisar et al., Circulation, 111: 204-211, 2005;
[1282] Gruber et al., J. Immunol., 152: 5368, 1994;
[1283] Gupta and Zhang Postgrad. Med. J., 81: 236-242, 2005;
[1284] Guss et al., EMBO J., 5: 1567-1575, 1986;
[1285] Hahn et al., Virology, 162: 167-180, 1988;
[1286] Ham et al., Meth. Enz., 58:44, 1979;
[1287] Harlow and Lane (editors) Antibodies: A Laboratory Manual, Cold Spring Harbour Laboratory, (1988);
[1288] Hartmann and Endres (editors), Manual of Antisense Methodology, Kluwer (1999);
[1289] Hellstrom et al., Cancer. Res., 45: 2210-2188, 1985;
[1290] Hellstrom et al., Cancer Res., 46: 3917-3923, 1986;
[1291] Henttu and Vihko, Biochem. Biophys. Res. Comm., 160: 903-910, 1989;
[1292] Herbrig et al., Ann. Rheum. Dis., 65: 157-163, 2006;
[1293] Herlyn et al., J Clin. Immunol 2: 135, 1982;
[1294] Hermonat et al., Proc. Natl. Acad. Sci. USA, 81: 6466-6470, 1984;
[1295] Hilkens et al., Trends in Bio. Chem. Sci., 17: 359, 1992;
[1296] Hochberg and Benjamini, Stat. Med., 9: 811-818, 1990;
[1297] Hoffmann et al., Cancer Res., 57: 3847-3851, 1997;
[1298] Hollinger et al., Proc. Natl. Acad. Sci. USA, 90: 6444-6448 1993;
[1299] Hoon et al., Cancer Res., 53: 5244-5250, 1993;
[1300] Irizarry et al., Biostatistics, 4: 249-264, 2003;
[1301] Itoh et al., Nature, 308: 19, 1986;
[1302] Jakobovits et al., Nature Biotechnology, 25, 1134-1143 2007;
[1303] Jung and Roh, J. Clin. Neurol, 4: 139-147, 2008;
[1304] Kabat et al., Sequences of Proteins of Immunological Interest, 5th Ed. Public Health Service, National Institutes of Health, Bethesda, Md., (1987 and 1991);
[1305] Kam et al., Proc. Natl. Acad. Sci. USA, 102: 11600-11605, 2005;
[1306] Kamarch, Methods Enzymol., 151:150-165, 1987;
[1307] Kang et al., Clin. Exp. Pharmacol. Physiol., Published online 22 Jun. 2009;
[1308] Kawamoto and Losordo, Trends Cardiovasc. Med., 18: 33-37, 2008;
[1309] Klein et al., Proc. Natl. Acad. Sci. USA, 100: 8886-8891, 2003;
[1310] Kohler and Milstein, Nature 256: 495-497, 1975;
[1311] Kohler and Milstein, Eur. J. Immunol., 6: 511-519, 1976;
[1312] Kostelny et al., J. Immunol., 148:1547-1553 1992;
[1313] Krenning et al., Trends in Mol. Med., 15: 180-189, 2009;
[1314] Largaespada et al., Curr. Top. Microbiol. Immunol., 166: 91-96, 1990;
[1315] Largaespada et al., J. Immunol. Methods., 197: 85-95, 1996;
[1316] Levine et al., J. Immunol., 159: 5921-5930, 1997;
[1317] Limaye et al., Blood, 105: 3169-77, 2005;
[1318] Lindmark et al., J Immunol Meth., 62: 1-13, 1983;
[1319] Litwin, et al., J. Cell Biol. 139, 219-228, 1997;
[1320] Liu et al., Antioxid. Redox Signal., 10: 1869-1882, 2008;
[1321] Livingston et al., J Clin. Oncol., 12: 1036-1044, 1994;
[1322] Lonberg et al., Nature, 368: 856-859, 1994;
[1323] Lonberg, In: “Transgenic Approaches to Human Monoclonal Antibodies.” Handbook of Experimental Pharmacology, 113: 49-101 (1994);
[1324] Lukacs et al., J. Exp. Med., 194: 551-555, 2001;
[1325] Lyden et al., Nature Med., 7: 1194-1201, 2001;
[1326] Marks et al., Bio/Technology, 10:779-783, 1992;
[1327] Mather et al., Annals N.Y. Acad. Sci., 383: 44-68, 1982;
[1328] Mendoza et al., Biotechniques 27: 778-788, 1999;
[1329] Messing Methods Enzymol, 101: 20-78, 1983;
[1330] Millstein et al., Nature, 305: 537-539, 1983;
[1331] Miltenyi et al., Cytometry, 11: 231-238, 1990;
[1332] Narang, et al., Meth. Enzymol., 68: 90, 1979;
[1333] Narang, editor, “Synthesis and Applications of DNA and RNA” Academic Press, New York (1987);
[1334] Natali et al., Cancer, 59: 55-63, 1987;
[1335] Needleman and Wunsch, J. Mol. Biol., 48: 443-453, 1970;
[1336] Nelson et al., Electrophoresis, 21: 1155-1163, 2000;
[1337] Nicolau and Sene, Biochim. Biophys. Acta, 721: 185-190, 1982;
[1338] Nielsen et al., J. Chem. Soc. Perkin Trans., 1: 3423, 1997;
[1339] Novellino et al., Cancer Immunol. Immunother. 54:187-207, 2005;
[1340] Orum et al., Nucl. Acids Res., 21: 5332, 1993;
[1341] Perbal (editor), “A Practical Guide to Molecular Cloning”, John Wiley and Sons (1984);
[1342] Perez and Walker, J. Immunol., 142: 3662-3667, 1990;
[1343] Perikles, Bioinformatics, 19: 1439-1440, 2003;
[1344] Pluckthun, Immunol. Revs., 130:151-188, 1992;
[1345] Putney et al., Science, 234: 1392-1395, 1986;
[1346] Rafat, Crit. Care Med., 35: 1677-1684, 2007;
[1347] Ramanujam et al., IEEE Transactions on Biomedical Engineering, 48: 1034-1041, 2001;
[1348] Ragnhammar et al., Int. J. Cancer, 53: 751-758, 1993;
[1349] Reff et al., Blood, 83: 435-445, 1994;
[1350] Rehman et al., Circulation, 107: 1164-1169, 2007;
[1351] Rippe et al., Mol. Cell. Biol., 10: 689-695, 1990;
[1352] Rosenfeld et al., Science, 252: 431-434, 1991;
[1353] Rosenfeld et al., Cell, 68: 143-155, 1992;
[1354] Rota et al., Virology, 188: 135-142, 1982;
[1355] Rotmans et al., Can. J. Cardiol., 22: 929-932, 2006;
[1356] Rusinova et al., Cancer Cell., 4: 277-289, 2003;
[1357] Saleh et al., J. Immunol., 151: 3390-3398, 1993;
[1358] Sambrook et al. (editors), “Molecular Cloning: A Laboratory Manual”, Cold Spring Harbour Laboratory Press (1989);
[1359] Santa Lucia, Proc. Natl. Acad. Sci. USA, 95: 1460-1465, 1995;
[1360] Schatterman et al., J. Clin. Invest., 106: 571-578, 2000;
[1361] Scopes (editor), “Protein purification: principles and practice”, Third Edition, Springer Verlag (1994);
[1362] Sgouros et al., J Nucl. Med., 34: 422-430, 1993;
[1363] Shaked et al., Cancer Cell., 7: 101-111, 2005;
[1364] Shalaby et al., J. Exp. Med., 175: 217-225, 1992;
[1365] Shitara et al., Cancer Immunol. Immunother., 36: 373-380, 1993;
[1366] Shield et al., 2002, J. Biol. Chem. 277: 26733-26740;
[1367] Shinkawa et al., J. Biol. Chem. 278: 3466-3473, 2003;
[1368] Shopes, Immunol., 148: 2918-2922, 1992;
[1369] Singh and Wengel, “Universality of LNA-Mediated High-Affinity Nucleic Acid Recognition”, Chem. Commun., 1247-1248 (1998);
[1370] Skerra et al., Curr. Opinion in Immunol., 5: 256-262, 1993;
[1371] Smyth et al., Bioinformatics (Oxford, England) 21: 2067-2075, 2005;
[1372] Smyth, In: Bioinformatics and Computational Biology Solutions using R and Bioconductor, Gentleman, Carey, Dudoit, Irizarry, Huber (eds.), Springer, New York, pages 397-420, 2005;
[1373] Sobrino et al., Stroke, 38: 2759-2764, 2007;
[1374] Spandidos et al., BMC Genomics, 9: 633, 2008;
[1375] Suresh et al., Methods in Enzymology, 121: 210, 1986;
[1376] Stevenson et al., Anti-Cancer Drug Design, 3:219-230 1989;
[1377] Taguchi et al., J. Clin. Invest., 114: 330-338, 2004;
[1378] Tailor et al., Nucl. Acids Res. 1816: 4928, 1990;
[1379] Tepper et al., Circulation, 106: 2781-2786, 2002;
[1380] Thompson et al., Nucl. Acids Res., 22: 4673-4680, 1994;
[1381] Tomizuka et al., Proc. Natl. Acad. Sci., USA 97: 722-727, 2000;
[1382] Tratschin et al., Mol. Cell. Biol., 5: 3251-3260, 1985;
[1383] Tratschin et al., J. Virol., 51: 611-619, 1984;
[1384] Traunecker et al., EMBO J., 10: 3655-3659, 1991;
[1385] Tur-Kaspa et al., Mol. Cell. Biol., 6: 716-718, 1986;
[1386] Tutt et al., J. Immunol., 147: 60, 1991;
[1387] Ukai et al., J. Neurotrauma, 24: 508-520, 2007;
[1388] Vacanti, et al., J. Ped. Surg., 23: 3-9 1988;
[1389] Vacanti, et al., Plast. Reconstr. Surg., 88: 753-9 1991;
[1390] Van der Sluis et al., Gastroenterology, 131: 117-129, 2006;
[1391] Vijayasardahl et al., J Exp. Med., 171: 1375-1380, 1990;
[1392] Wang and Seed Nucl. Acids Res. 31: e154, 2003;
[1393] Wang et al., J Clin Invest., 118: 2629-2639, 2008;
[1394] Westerweel et al., Rheum. Dis., 66: 865-870, 2007;
[1395] Westerweel and Verhaar, Nat. Rev. Rheumatol., 5: 332-340, 2009;
[1396] Wettenhall and Smyth, Bioinformatics (Oxford, England), 20: 3705-3706, 2004;
[1397] Wolff et al., Cancer Research, 53: 2560-2565, 1993;
[1398] Wondisford et al., Mol. Endocrinol., 2: 32-39, 1988;
[1399] Wu and Wu, J. Biol. Chem., 262: 4429-4432, 1987;
[1400] Yang et al., Proc. Natl. Acad. Sci. USA, 87: 9568-9572, 1990;
[1401] Yaniv, Nature, 297: 17-18, 1982;
[1402] Yip et al., Stroke, 63: 69-74, 2008;
[1403] Yokata et al., Cancer Res., 52: 3402-3408, 1982;
[1404] Young et al., Prog. Cardiovasc. Dis., 49: 421-429, 2007;
[1405] Yu et al., Cancer Res. 51: 468-475, 1991;
[1406] Zhang et al., Circ. Res., 90: 284-288, 2002;
[1407] Zhang et al., Blood, 105: 3286-3294, 2005;
[1408] Zhu et al., Circulation, 118: 2156-2165, 2008; and
[1409] Zondor et al., Ann. Pharmacal, 38: 1258-1264, 2004.

The application's sequence listing, which the Patent Office published only in electronic form, follows.

SEQUENCE LISTING (340 sequences)

SEQ ID NO: 1 - DNA, 4309 bp, Homo sapiens
acatccgggaacgccagcagccggctgagggctgcataactgatggagggccgggcgcggtaagagcgtctcgggggagtggggcaaggcggccgggcccctcccattccgccttttcttcagcgtcctacccgcggcactggctgcgagcgccgggccacctgcgagtgtgcgcagggactctggacacccgcggcggcgagctgagggagcagtctccacgaggacccaggcggaccctctggcgccatgcgcgccctccccggcctgctggaggccagggcgcgtacgccccggctgctcctcctccagtgccttctcgctgccgcgcgcccaagctcggcggacggcagtgccccagattcgccttttacaagtccacctctcagagaagaaataatggcaaataacttttccttggagagtcataacatatcactgactgaacattctagtatgccagtagaaaaaaatatcactttagaaaggccttctaatgtaaatctcacatgccagttcacaacatctggggatttgaatgcagtaaatgtgacttggaaaaaagatggtgaacaacttgagaataattatcttgtcagtgcaacaggaagcaccttgtatacccaatacaggttcaccatcattaatagcaaacaaatgggaagttattcttgtttctttcgagaggaaaaggaacaaaggggaacatttaatttcaaagtccctgaacttcatgggaaaaacaagccattgatctcttacgtaggggattctactgtcttgacatgtaaatgtcaaaattgttttcctttaaattggacctggtacagtagtaatgggagtgtaaaggttcctgttggtgttcaaatgaataaatatgtgatcaatggaacatatgctaacgaaacaaagctgaagataacacaacttttggaggaagatggggaatcttactggtgccgtgcactattccaattaggcgagagtgaagaacacattgagcttgtggtgctgagctatttggtgcccctcaaaccatttcttgtaatagtggctgaggtgattcttttagtggccaccattctgctttgtgaaaagtacacacaaaagaaaaagaagcactcagatgaggggaaagaatttgagcagattgaacagctgaaatcagatgatagcaatggtatagaaaataatgtccccaggcatagaaaaaatgagtctctgggccagtgaatacaaaacatcatgtcgagaatcattggaagatatacagagttcgtatttcagctttgtttatccttcctgttaagagcctctgagtttttagttttaaaaggatgaaaagcttatgcaacatgctcagcaggagcttcatcaacgatatatgtcagatctaaaggtatattttcattctgtaattatgttacataaaagcaatgtaaatcagaataaatatgttagaccagaataaaattaattatattctggtcttcaaaggacacacagaacagatatcagcagaatcacttaatacttcatagaacaaaaatcactcaaaacctgtttataaccaaagaattcatgaaaaagaaagcctttgccatttgtcttagaaagttattttttaaaaaaaaatcatacttactattagtatctatggaagtatatgtaacaatttttatgtaaaggtcatctttctgtgatagtgaaaaaatatgtctttactaagttgaaatgaatactttctgcctttgctaatgatagttattctacaatctccacaagaaaaatataccttttatccggaaatattggtttaaggcaaataaataaaactgtgcttgctctaaagctctgcactacaaaagcaaattttccagtctttattccactcataaccactgctttccccaccaggctaaagtgcttcttagtcttaaatagggtttttaacttcataaggtacaccattgtttatgttttagggtgcaggtccatatagtcgtaatacttaaaacactgctacactgatgcttttgtggctcatggtttcctggttctttgatttaacacctggcttcctggtatctatggctggttaaatatctaaacctgcattattagtgctttacaataataattcccttgactgaagtccagaaatactaaagcacttcttttttattgctgtgaatgccttagacttatcttccaaaataggatacttcgtttctattgcatatataactgaaatattttataaactcactgtaatcaaatcttataaaatctgaatcaacatgaaaagttgtcaatgcttgaatgaatactaaaatcataccacaagatactagataacataaatgaccatgaagtgtcccactgctcaaagggcaacaactttaagaacagaagcaaagagtggtggtgtggaacccaagattcttggcgactagggaatttaaaggttggggaggaggaattcaatgatttgacaagaaatactttataaaaatttgctccatgtattggctaagaaaaatataataaaattttggtagtgaaaattgtatcactaatgtttaccaatattactagtatgaataatacacataaggtagtgacttggaagctgctcaatactttgttgctataacaaaatgcaatattttgttgtaaagcatcttaactacacatataagtttgctgaacttgaatacatcccggtaatggcaaacttcattttattcttggttttcattttattctggtctcagggccatacatttattttagtttaattaattattattttgacaacattacttgggtaatatctatataatggtagataaccaatcagttagcttaattaatctaagctatttgaattcagggaaatattagtcaaatctgctgtttgactaaatacaattcaaagcagtgtatttgtgacttggaatatagaacacaaacaaatgtgtaacccatctgcagtatgcattcttccattttaccaccactaaccattgaggctcatacaattttcaagcaacaagcattgcttcccaaaggtaaaataatcaggaatatttctatagtaaatggagtttttaattggcaatactgtttatttttttctagcaaagacaatttatctcagtaaccttaaataggaaaagtactcaaaaattaaagttgacttttggctttttgtagtctctctggaggacttccagaaaattaccactgttggattttaatctgcttccattaaccaatcttacagagatgataaatgaattaactaatattgaccaaatataaattgactgcaaataataagccgcataaaagttgaagtaggaaaactactccaagtttatatattaggcaccttggggaattctcttagtctttccagctaacaaggattttcagcataataagtagatttaatgatggcataaaattcccagatactttcatatacattttttgccaaagtgtaaatcttctccttttgcagtctttttgttattatcccaacatctagctgctcaggccctaatttagaactcattctgatattttcttcttctgtattaattaatacttatgggtcatgaatccctgctcctttgacctttttaatagctcatgaatccatcccattgcctccccaactctgcccacacctgctgcaacactaatgccttgattttcctacctcagtctccttttctattaatccctcttttgcgtggctgcctgagtccactttctcaaacacaaacctcactatgcaactttggaatctctgtaggctcacctttgccatttcttaatattgcattctccaaattgctaatctctatccagtctcttgaactagacttggcacatggagattccgctcagaaagtgctcttcacacttctacctgcttgactaaccccagattatctttcaagactttaatctgatcttgtgtcttagagaagcccccatacctggtagagcatgtaccatcttacatgcttaaataactccacatttatttgtgtttattactctgtgttataaatatacatttgttggtctctctcttggattattttgtttctttgtcctgtaactaccactgaaagggtgcaatacagctttcttgaaatgtgtattgaacggatgaatgtataaataaaaattaaattttgtaaatttctgcttattcttagaaaaagaatctaaattgtgacaaatcagaattgaaaaaagtattctaataaagaaaaacaagcttttataa

SEQ ID NO: 2 - protein, 327 aa, homo sapiens
MRALPGLLEARARTPRLLLLQCLLAAARPSSADGSAPDSPFTSPPLREEIMANNFSLESHNISLTEHSSMPVEKNITLERPSNVNLTCQFTTSGDLNAVNVTWKKDGEQLENNYLVSATGSTLYTQYRFTIINSKQMGSYSCFFREEKEQRGTFNFKVPELHGKNKPLISYVGDSTVLTCKCQNCFPLNWTWYSSNGSVKVPVGVQMNKYVINGTYANETKLKITQLLEEDGESYWCRALFQLGESEEHIELVVLSYLVPLKPFLVIVAEVILLVATILLCEKYTQKKKKHSDEGKEFEQIEQLKSDDSNGIENNVPRHRKNESLGQ

SEQ ID NO: 3 - DNA, 3309 bp, Homo sapiens
ggcggagagaataaagcagaaagacaggaagaggaggtggagttctacagttagtgtggttttagtttttcctaagaagtggcgtggtttggggctttatatccgggaggagcatatgtacgcaaatcctggggcgtttgcaaacccggatccggggcgtctggccccatgcccggccgggcgtttgagggctactgccacgcagcgtttctggagcctgccggctggtgccctggtggcctttatctctgtccccctttgtcctctttatctcaggctctccaggaggccggggggcccactccgcctatcgctcccctcggctacgctgccacttcaatgccccgcaggtcgcgagctgctgttctttcgaaggcgtcggagaaccaggggcgtcccgcgccacctctgactcggagcagcgccgagcactgacgctcccgcccttgggcaaggacgccagtgcgcccgcgcgcgtccctctgcgcggcagcccgtcgcgggccctcaaggggaagcccaggccaggatggccccgggtcgcgcggtggccgggctcctgttgctggcggccgccggcctcggaggagtggcggaggggccagggctagccttcagcgaggatgtgctgagcgtgttcggcgcgaatctgagcctgtcggcggcgcagctccagcacttgctggagcagatgggagccgcctcccgcgtgggcgtcccggagcctggccagctgcacttcaaccagtgtttaactgctgaagagatcttttcccttcatggcttttcaaatgctacccaaataaccagctccaaattctctgtcatctgtccagcagtcttacagcaattgaactttcacccatgtgaggatcggcccaagcacaaaacaagaccaagtcattcagaagtttggggatatggattcctgtcagtgacgattattaatctggcatctctcctcggattgattttgactccactgataaagaaatcttatttcccaaagattttgaccttttttgtggggctggctattgggactcttttttcaaatgcaattttccaacttattccagaggcatttggatttgatcccaaagtcgacagttatgttgagaaggcagttgctgtgtttggtggattttacctacttttcttttttgaaagaatgctaaagatgttattaaagacatatggtcagaatggtcatacccactttggaaatgataactttggtcctcaagaaaaaactcatcaacctaaagcattacctgccatcaatggtgtgacatgctatgcaaatcctgctgtcacagaagctaatggacatatccattttgataatgtcagtgtggtatctctacaggatggaaaaaaagagccaagttcatgtacctgtttgaaggggcccaaactgtcagaaatagggacgattgcctggatgataacgctctgcgatgccctccacaatttcatcgatggcctggcgattggggcttcctgcaccttgtctctccttcagggactcagtacttccatagcaatcctatgtgaggagtttccccacgagttaggagactttgtgatcctactcaatgcagggatgagcactcgacaagccttgctattcaacttcctttctgcatgttcctgctatgttgggctagcttttggcattttggtgggcaacaatttcgctccaaatattatatttgcacttgctggaggcatgttcctctatatttctctggcagatatgtttccagagatgaatgatatgctgagagaaaaggtaactggaagaaaaaccgatttcaccttcttcatgattcagaatgctggaatgttaactggattcacagccattctactcattaccttgtatgcaggagaaatcgaattggagtaatagaaaatggaagatggtgttgttaataaaggcatttaatagataaaaacatctccaaaaaggattttgaagctgatcctatttagttaaaaagataattttgctttcaactgtaggtccagaaaactaattattggcatcagtctgtgaaatagtccattatttgttgttaaaaatgcttcaaaaggttttcagtgtcagtctgagatgcctggtatataggagcctttgggaaatacctatttttcagtattccatgcatattagatatcaccatgaagcaagagacatgcattctataatcatgtagacactcagactcaggggaaaatacaagttatatcctgaaagcctttaaaactctatggtaggatcaaagattcaaatggtttcagagaggttttatttcaattaatttgttctagtgctttcaagagcaagtacatcaaaatgtagaaggtaaaatgtatgcaacactaatataaattattccaagtctttaaggagccaaagaaaaaaaagatttctcacagctttttgttctgttttgtatttcaattaggaacttgcagtattattttgaaaaccattctaaaataataggagttaggaaataaataaagttttgctagccctgctaagttcaggcttagaggcttatcgctaagtataaacttcaccagattccacgaaaagctggatagctttttttctgacttatgttgtggttgcacccctcacaaatggcagaacagtatgtaaagctggtaacacctcggtttcagtgcaccatgtgtttgctttgtgaaggtgaagaatatgttggtttagagaaagaaattggatgtaattttatgcaatttacttttaaagacaaacataactatttagcagagaatattttaataaatgcaaaacaacagctggactgctgtacatcaaggacagattaactggaaaacatatgttccttatgtgtgatcgagagccattcagaaaagacttcctttgtgttcagcctatacttttccatatggtataccttgaaaaaaattagcacaccatggttatttttctaccttttataaaagacagagcctgtttactcatttagaagatagagaaaattggtctaaaattgaacatcctagattcacactcccaagtcacttaaggtgatttgatggtgaggaaaatgattgacaaagcccaacaatgatctcaggaattacattttccaacagaccaaaaaatgttttcatgtagcagcaatgcagatttggtgaatatttaatatatattttagtatgtatttcactttatgactgacaattaaaaaatattgtttggccaaatagtaaacacccttttgaaaccatgaaaaaaaaaaaaaaaaa

SEQ ID NO: 4 - protein, 460 aa, Homo sapiens
MAPGRAVAGLLLLAAAGLGGVAEGPGLAFSEDVLSVFGANLSLSAAQLQHLLEQMGAASRVGVPEPGQLHFNQCLTAEEIFSLHGFSNATQITSSKFSVICPAVLQQLNFHPCEDRPKHKTRPSHSEVWGYGFLSVTIINLASLLGLILTPLIKKSYFPKILTFFVGLAIGTLFSNAIFQLIPEAFGFDPKVDSYVEKAVAVFGGFYLLFFFERMLKMLLKTYGQNGHTHFGNDNFGPQEKTHQPKALPAINGVTCYANPAVTEANGHIHFDNVSVVSLQDGKKEPSSCTCLKGPKLSEIGTIAWMITLCDALHNFIDGLAIGASCTLSLLQGLSTSIAILCEEFPHELGDFVILLNAGMSTRQALLFNFLSACSCYVGLAFGILVGNNFAPNIIFALAGGMFLYISLADMFPEMNDMLREKVTGRKTDFTFFMIQNAGMLTGFTAILLITLYAGEIELE

SEQ ID NO: 5 - DNA, 4346 bp, Homo sapiens
gcgggaacgcgcgttgggggtcaggtgccggaagaggaaacctctcgctggggctaggagttcggcggggcgcgcgccggcggctgcggagctggcaggtgcgaagcgtctgcacctggcgggcgatggcgcccgatgcgggcgccccgggatagcgtgggcgaggctgcggggccccggcgcgcacgcccgcacctctccccagccctggcgtgggcccagcccggcccaggcagcaatggggttcctgcagctgctggtcgtagcggtgctggcatccgaacaccgggtggctggtgcagccgaggtcttcgggaattccagcgagggtcttattgaattttctgtggggaaatttagatacttcgagctcaataggccctttccagaggaagctattttgcatgatatttcaagcaatgtgacttttcttattttccaaatacactcacagtatcagaatacaactgtttccttttctccgactctcctttccaattcctcggaaacaggcactgccagtggactggttttcatccttagaccagagcagagtacatgcacttggtacttggggacttcaggcatacagcctgtccagaatatggctatcctactctcctactcagaaagagatcctgtccctggaggctgtaatttggagttcgatttagatattgatcccaacatttacttggagtataatttctttgaaacgactatcaagtttgccccagcaaacctaggctatgcgagaggcgtagatcccccaccatgtgacgctgggacagaccaggactccaggtggaggttgcagtatgatgtctatcagtattttctgcctgagaatgacctcactgaggagatgttgctgaagcatctgcagaggatggtcagtgtgccccaggtgaaggccagtgctctcaaggtggttaccctaacagctaatgataagacaagtgtttccttctcctccctcccgggacaaggtgtcatatacaatgtcattgtttgggacccgtttctaaatacatctgctgcctacattcctgctcacacatacgcttgcagctttgaggcaggagagggtagttgtgcttccctaggaagagtgtcttccaaagtgttcttcactctttttgccctgcttggtttcttcatttgtttctttggacacagattctggaaaacagaattattcttcataggctttatcatcatgggattcttcttttatatactgattacaagactgacacctatcaagtatgatgtgaatctgattctgacagctgtcactggaagcgtcggtggaatgttcttggtagctgtgtggtggcgatttggaatcctctcgatctgcatgctctgtgttggactagtgctggggttcctcatctcgtcagtgactttctttactccactgggaaacctaaagatttttcatgatgatggtgtattctgggtcactttctcttgcatagctatcctcattccagtagttttcatgggctgcctaagaatactgaacatactgacttgtggagtcattggctcctattcggtggttttagccattgacagttactggtccacaagcctttcctacatcactttgaacgtactcaagagagcgctcaacaaggatttccacagagctttcacaaatgtgccttttcaaactaatgacttcattatcctggcagtatggggcatgctggctgtaagtggaattacgttacagattcgaagagagagaggacgaccgttcttccctccccacccatacaagttatggaagcaagagagagagcgccgagtgacaaacattctggaccctagctaccacattcctccattgagagagaggctctatggccgattaacccagattaaagggctcttccagaaggagcagccagctggagagagaacgcctttgcttctgtagatgcccaggggcttggtcagtgtgcctcagctttggagttcatgcctggagtggttcaacagtctctggtgcaagtctaataagagatcaggcatatatatctgttctttgcataatattatggtgcccttattgatatatggtaagggtgtactaggggattaggatgattgtaagagaatgagaaagatgaccaaaaggttggtggtagggaggctttttcttatttccaaatacttgagaaattaccttttggtttacaaatctatgatcaacttattccattaaatagatacattaaaaaaattaaaaactgattcttctgcagagcactggtgtttctttttataaccccttgaaacaagtctctcacctgagcctgtctaaactttcggagggagtttattattgagtctttatctgtgacagtatttggagatttagggatttgatacttaggcctttgaattttagaatacaaaaagagaagcaagccagacatggtggctcacacctgtaatcccaatactgggaagccaaggtgggagtatcgcttgagcccaggagtttgagaccgacatgggcaacatgacaagaccccatctctacaaaaaaattaaaaaattagccaggcatggtggcacatgcctactcccagctcccaaggagactgagatgggaggatccctggagccctgaagattgaggctacagtgagccttgattgtgtcactgcactccagcttgggtgacagagaccctgtctcgagaaattaaaaaaaaaaaaaacttattttcttactaaaagcagtctgattacttagttgcatgcccttcttagtatcatacattatccaaaagttaccctttgtttttttttcagtattttttaaaatttttaagttgtgataaaatacacatgaaatttaccttcttattcatgtttaagtgtacaattcagtaggttccctttgtttttgccttttattgcttaaaatggtaattgaaatagctaaattattatttgaaaataggccaatttatatagataatagaattttataagggtgatttatattccaaataatggcccccttttttttttcaaggccttttcaaatagtgtcaacaggtgatctttaatttaactgcattagatgacatatggattacttttgtttttaggaaataacccccaccttaatctatattgccgaccaggtgcggtggctcaaacctgtaatcccagcattttgggaggtcgaggcgggtggatcacctggggtcaggagttcgagaccagcctggccaacatagtggtctctactatagtatagtagaatatatactactacaccctgtctctactaaaaatacaaaaattagctgggtattgtggcaggtgcctgtaatcccagctactcgggaggctgaggcaggagaatcgcttgaacccaggaggcagaggttgcagtgagccaagatcacgccactgcactccaccctgggcaacagagcgagactccgtctcaaaaaaaaaaaaagtctgtattgccattaataagaaaaccttagaaaaatttgtacttcatagttctttctgctcaattagctgttagcattagtgtaaaatatagtttttaataatttctgtacaaagcctttgtacagaaaggcttcatccttaaagtgatgagaatggagtcaaaaaggattcaggtgtttagaggagctgcttttcattaggaccttggagagtcccctcagttttgacacccttgtttcaccacaagaaagcacccgacaccctgggttgcatacttactactcaggggctttccccccagctttcagagcactgaattattgtgagctggtgactctgcaggcctgagtggtattagggttgtggaatgttgttgcatacacgtttatgagttaaccactatttaaatgatgctgctttttaaagttttttcaaagtacaatagatttttgaagtttcaggtaactggaaaaatatttaacttttgctttaagtgtttggggcaggataaaacaacatagaaaatataaaacaatttttgctttgaaaaatacagtgcaggtgaccatttactgcttattctgtaatccttactgtctataattaacttcagtaacactgaaacttgatgaaaagttttaaaaaattatttactgtagggacaaagttatatggaatgtttgttattttctatactatctgaatgcactgccagtgaagactgtaaagacagaacacactattttggagggaggatactaattgtttaaaatttttcatcatttgtgagtgataaaaagtttgtatagtttttataataaatccctattttgaaaaaaatgctaaaaa

SEQ ID NO: 6 - protein, 570 aa, Homo sapiens
MGFLQLLVVAVLASEHRVAGAAEVFGNSSEGLIEFSVGKFRYFELNRPFPEEAILHDISSNVTFLIFQIHSQYQNTTVSFSPTLLSNSSETGTASGLVFILRPEQSTCTWYLGTSGIQPVQNMAILLSYSERDPVPGGCNLEFDLDIDPNIYLEYNFFETTIKFAPANLGYARGVDPPPCDAGTDQDSRWRLQYDVYQYFLPENDLTEEMLLKHLQRMVSVPQVKASALKVVTLTANDKTSVSFSSLPGQGVIYNVIVWDPFLNTSAAYIPAHTYACSFEAGEGSCASLGRVSSKVFFTLFALLGFFICFFGHRFWKTELFFIGFIIMGFFFYILITRLTPIKYDVNLILTAVTGSVGGMFLVAVWWRFGILSICMLCVGLVLGFLISSVTFFTPLGNLKIFHDDGVFWVTFSCIAILIPVVFMGCLRILNILTCGVIGSYSVVLAIDSYWSTSLSYITLNVLKRALNKDFHRAFTNVPFQTNDFIILAVWGMLAVSGITLQIRRERGRPFFPPHPYKLWKQERERRVTNILDPSYHIPPLRERLYGRLTQIKGLFQKEQPAGERTPLLL

SEQ ID NO: 7 - DNA, 5121 bp, Homo sapiens
gcgaggaggaaacggtgccggagcgcgcagggcttgctgccgccaccgccgctgcacaggctgccggagcgagcctgccgcgcgccgccctccccgctctccttcctgggcgagctgcggggatggggcggccgcgggagcccgagcgcgcgcaggaaccgccgccgccgccgcccgcgtctccgttgccgcgcgcctgagccgccgtcgccgccgcgcgccctgcccgggggcggcccccccagccccatggaggtctcccggaggaaggcgccgccgcgccccccgcgccccgcagcgccactgcccctgctcgcctatctgctggcactggcggctcccggccggggcgcggacgagcccgtgtggcggtcggagcaagccatcggagccatcgcggcgagccaggaggacggcgtgtttgtggcgagcggcagctgcctggaccagctggactacagcctggagcacagcctctcgcgcctgtaccgggaccaagcgggcaactgcacagagccggtctcgctggcgccccccgcgcggccccggcccgggagcagcttcagcaagctgctgctgccctaccgcgagggggcggccggcctcggggggctgctgctcaccggctggaccttcgaccggggcgcctgcgaggtgcggcccctgggcaacctgagccgcaactccctgcgcaacggcaccgaggtggtgtcgtgccacccgcagggctcgacggccggcgtggtgtaccgcgcgggccggaacaaccgctggtacctggcggtggccgccacctacgtgctgcctgagccggagacggcgagccgctgcaaccccgcggcatccgaccacgacacggccatcgcgctcaaggacacggaggggcgcagcctggccacgcaggagctggggcgcctcaagctgtgcgagggcgcgggcagcctgcacttcgtggacgcctttctctggaacggcagcatctacttcccctactacccctacaactatacgagcggcgctgccaccggctggcccagcatggcgcgcatcgcgcagagcaccgaggtgctgttccagggccaggcatccctcgactgcggccacggccaccccgacggccgccgcctgctcctctcctccagcctagtggaggccctggacgtctgggcgggagtgttcagcgcggccgctggagagggccaggagcggcgctcccccaccaccacggcgctctgcctcttcagaatgagtgagatccaggcgcgcgccaagagggtcagctgggacttcaagacggccgagagccactgcaaagaaggggatcaacctgaaagagtccaaccaatcgcatcatctaccttgatccattccgacctgacatccgtttatggcaccgtggtaatgaacaggactgttttattcttggggactggagatggccagttacttaaggttattcttggtgagaatttgacttcaaattgtccagaggttatctatgaaattaaagaagagacacctgttttctacaaactcgttcctgatcctgtgaagaatatctacatttatctaacagctgggaaagaggtgaggagaattcgtgttgcaaactgcaataaacataaatcctgttcggagtgtttaacagccacagaccctcactgcggttggtgccattcgctacaaaggtgcacttttcaaggagattgtgtacattcagagaacttagaaaactggctggatatttcgtctggagcaaaaaagtgccctaaaattcagataattcgaagcagtaaagaaaagactacagtgactatggtgggaagcttctctccaagacactcaaagtgcatggtgaagaatgtggactctagcagggagctctgccagaataaaagtcagcccaaccggacctgcacctgtagcatcccaaccagagcaacctacaaagatgtttcagttgtcaacgtgatgttctccttcggttcttggaatttatcagacagattcaactttaccaactgctcatcattaaaagaatgcccagcatgcgtagaaactggctgcgcgtggtgtaaaagtgcaagaaggtgtatccaccccttcacagcttgcgacccttctgattatgagagaaaccaggaacagtgtccagtggctgtcgagaagacatcaggaggaggaagacccaaggagaacaaggggaacagaaccaaccaggctttacaggtcttctacattaagtccattgagccacagaaagtatcgacattagggaaaagcaacgtgatagtaacgggagcaaactttacccgggcatcgaacatcacaatgatcctgaaaggaaccagtacctgtgataaggatgtgatacaggttagccatgtgctaaatgacacccacatgaaattctctcttccatcaagccggaaagaaatgaaggatgtgtgtatccagtttgatggtgggaactgctcttctgtgggatccttatcctacattgctctgccacattgttcccttatatttcctgctaccacctggatcagtggtggtcaaaatataaccatgatgggcagaaattttgatgtaattgacaacttaatcatttcacatgaattaaaaggaaacataaatgtctctgaatattgtgtggcgacttactgcgggtttttagcccccagtttaaagagttcaaaagtgcgcacgaatgtcactgtgaagctgagagtacaagacacctacttggattgtggaaccctgcagtatcgggaggaccccagattcacggggtatcgggtggaatccgaggtggacacagaactggaagtgaaaattcaaaaagaaaatgacaacttcaatatttccaaaaaagacattgaaattactctcttccatggggaaaatgggcaattaaattgcagttttgaaaatattactagaaatcaagatcttaccaccatcctttgcaaaattaaaggcatcaagactgcaagcaccattgccaactcttctaagaaagttcgggtcaagctgggaaacctggagctctacgtcgagcaggagtcagttccttccacatggtattttctgattgtgctccctgtcttgctagtgattgtcatttttgcggccgtgggggtgaccaggcacaaatcgaaggagctgagtcgcaaacagagtcaacaactagaattgctggaaagcgagctccggaaagagatacgtgacggctttgctgagctgcagatggataaattggatgtggttgatagttttggaactgttcccttccttgactacaaacattttgctctgagaactttcttccctgagtcaggtggcttcacccacatcttcactgaagatatgcataacagagacgccaacgacaagaatgaaagtctcacagctttggatgccctaatctgtaataaaagctttcttgttactgtcatccacacccttgaaaagcagaagaacttttctgtgaaggacaggtgtctgtttgcctccttcctaaccattgcactgcaaaccaagctggtctacctgaccagcatcctagaggtgctgaccagggacttgatggaacagtgtagtaacatgcagccgaaactcatgctgagacgcacggagtccgtcgtcgaaaaactcctcacaaactggatgtccgtctgcctttctggatttctccgggagactgtcggagagcccttctatttgctggtgacgactctgaaccagaaaattaacaagggtcccgtggatgtaatcacttgcaaagccctgtacacacttaatgaagactggctgttgtggcaggttccggaattcagtactgtggcattaaacgtcgtctttgaaaaaatcccggaaaacgagagtgcagatgtctgtcggaatatttcagtcaatgttctcgactgtgacaccattggccaagccaaagaaaagattttccaagcattcttaagcaaaaatggctctccttatggacttcagcttaatgaaattggtcttgagcttcaaatgggcacacgacagaaagaacttctggacatcgacagttcctccgtgattcttgaagatggaatcaccaagctaaacaccattggccactatgagatatcaaatggatccactataaaagtctttaagaagatagcaaattttacttcagatgtggagtactcggatgaccactgccatttgattttaccagattcggaagcattccaagatgtgcaaggaaagagacatcgagggaagcacaagttcaaagtaaaagaaatgtatctgacaaagctgctgtcgaccaaggtggcaattcattctgtgcttgaaaaactttttagaagcatttggagtttacccaacagcagagctccatttgctataaaatacttttttgactttttggacgcccaggctgaaaacaaaaaaatcacagatcctgacgtcgtacatatttggaaaacaaacagccttcctcttcgcttctgggtaaacatcctgaagaaccctcagtttgtctttgacattaagaagacaccacatatagacggctgtttgtcagtgattgcccaggcattcatggatgcattttctctcacagagcagcaactagggaaggaagcaccaactaataagcttctctatgccaaggatatcccaacctacaaagaagaagtaaaatcttattacaaagcaatcagggatttgcctccattgtcatcctcagaaatggaagaatttttaactcaggaatctaagaaacatgaaaatgaatttaatgaagaagtggccttgacagaaatttacaaatacatcgtaaaatattttgatgagattctaaataaactagaaagagaacgagggctggaagaagctcagaaacaactcttgcatgtaaaagtcttatttgatgaaaagaagaaatgcaagtggatgtaagcactctggggcctggcttaatctggcaaagttcttcagacgacttgggagcaaaatggctgcttgagctactctgtgtcgttaatttgttgtttgcacataggttccactttgggcactgtctttttaagagaccaaggcacatgcacagcttttagaaagcaa

SEQ ID NO: 8 - protein, 1568 aa, Homo sapiens
MEVSRRKAPPRPPRPAAPLPLLAYLLALAAPGRGADEPVWRSEQAIGAIAASQEDGVFVASGSCLDQLDYSLEHSLSRLYRDQAGNCTEPVSLAPPARPRPGSSFSKLLLPYREGAAGLGGLLLTGWTFDRGACEVRPLGNLSRNSLRNGTEVVSCHPQGSTAGVVYRAGRNNRWYLAVAATYVLPEPETASRCNPAASDHDTAIALKDTEGRSLATQELGRLKLCEGAGSLHFVDAFLWNGSIYFPYYPYNYTSGAATGWPSMARIAQSTEVLFQGQASLDCGHGHPDGRRLLLSSSLVEALDVWAGVFSAAAGEGQERRSPTTTALCLFRMSEIQARAKRVSWDFKTAESHCKEGDQPERVQPIASSTLIHSDLTSVYGTVVMNRTVLFLGTGDGQLLKVILGENLTSNCPEVIYEIKEETPVFYKLVPDPVKNIYIYLTAGKEVRRIRVANCNKHKSCSECLTATDPHCGWCHSLQRCTFQGDCVHSENLENWLDISSGAKKCPKIQIIRSSKEKTTVTMVGSFSPRHSKCMVKNVDSSRELCQNKSQPNRTCTCSIPTRATYKDVSVVNVMFSFGSWNLSDRFNFTNCSSLKECPACVETGCAWCKSARRCIHPFTACDPSDYERNQEQCPVAVEKTSGGGRPKENKGNRTNQALQVFYIKSIEPQKVSTLGKSNVIVTGANFTRASNITMILKGTSTCDKDVIQVSHVLNDTHMKFSLPSSRKEMKDVCIQFDGGNCSSVGSLSYIALPHCSLIFPATTWISGGQNITMMGRNFDVIDNLIISHELKGNINVSEYCVATYCGFLAPSLKSSKVRTNVTVKLRVQDTYLDCGTLQYREDPRFTGYRVESEVDTELEVKIQKENDNFNISKKDIEITLFHGENGQLNCSFENITRNQDLTTILCKIKGIKTASTIANSSKKVRVKLGNLELYVEQESVPSTWYFLIVLPVLLVIVIFAAVGVTRHKSKELSRKQSQQLELLESELRKEIRDGFAELQMDKLDVVDSFGTVPFLDYKHFALRTFFPESGGFTHIFTEDMHNRDANDKNESLTALDALICNKSFLVTVIHTLEKQKNFSVKDRCLFASFLTIALQTKLVYLTSILEVLTRDLMEQCSNMQPKLMLRRTESVVEKLLTNWMSVCLSGFLRETVGEPFYLLVTTLNQKINKGPVDVITCKALYTLNEDWLLWQVPEFSTVALNVVFEKIPENESADVCRNISVNVLDCDTIGQAKEKIFQAFLSKNGSPYGLQLNEIGLELQMGTRQKELLDIDSSSVILEDGITKLNTIGHYEISNGSTIKVFKKIANFTSDVEYSDDHCHLILPDSEAFQDVQGKRHRGKHKFKVKEMYLTKLLSTKVAIHSVLEKLFRSIWSLPNSRAPFAIKYFFDFLDAQAENKKITDPDVVHIWKTNSLPLRFWVNILKNPQFVFDIKKTPHIDGCLSVIAQAFMDAFSLTEQQLGKEAPTNKLLYAKDIPTYKEEVKSYYKAIRDLPPLSSSEMEEFLTQESKKHENEFNEEVALTEIYKYIVKYFDEILNKLERERGLEEAQKQLLHVKVLFDEKKKCKWM

SEQ ID NO: 9 - DNA, 826 bp, Homo sapiens
tcatgtgacaaagcgcaggacccctcactgccccaactgcttgctgttctctctttcttgggctctaaggacccaggagtctgggtgcacagcctccttctctctgagattcaagagtctgatcagcagcctcttcctcctccaggacccagaagccctgagcttatccccatggagctctgccggtccctggccctgctggggggctccctgggcctgatgttctgcctgattgctttgagcaccgatttctggtttgaggctgtgggtcccacccactcagctcactcgggcctctggccaacagggcatggggacatcatatcaggctacatccacgtgacgcagaccttcagcattatggctgttctgtgggccctggtgtccgtgagcttcctggtcctgtcctgcttcccctcactgttccccccaggccacggcccgcttgtctcaaccaccgcagcctttgctgcagccatctccatggtggtggccatggcggtgtacaccagcgagcggtgggaccagcctccacacccccagatccagaccttcttctcctggtccttctacctgggctgggtctcagctatcctcttgctctgtacaggtgccctgagcctgggtgctcactgtggcggtccccgtcctggctatgaaaccttgtgagcagaaggcaagagcggcaagatgagttttgagcgttgtattccaaaggcctcatctggagcctcgggaaagtctggtcccacatctgcccgcccttccagcccttccccagcccctcctcttgtttcttcattcattcaacaaaatttggctggaa

SEQ ID NO: 10 - protein, 165 aa, Homo sapiens
MELCRSLALLGGSLGLMFCLIALSTDFWFEAVGPTHSAHSGLWPTGHGDIISGYIHVTQTFSIMAVLWALVSVSFLVLSCFPSLFPPGHGPLVSTTAAFAAAISMVVAMAVYTSERWDQPPHPQIQTFFSWSFYLGWVSAILLLCTGALSLGAHCGGPRPGYETL

SEQ ID NO: 11 - DNA, 1008 bp, Homo sapiens
atggcacaggtgagggcgctgcataaaatcatggcccttttttctgctaacagcataggtgctatgaacaactctgacactcgcatagcaggctgcttcctcactggcatccctgggctggagcaactacatatctggctgtccatccccttctgcatcatgtacatcactgccctggaaggcaatggcatcctaatttgtgtcatcctctcccaggcaatcctgcatgagcccatgtacatattcttatctatgctggccagtgctgatgtcttgctctctaccaccaccatgcctaaggccctggccaatttgtggctaggttatagcctcatttcctttgatggctgcctcactcagatgttcttcattcacttcctcttcattcactctgctgtcctgctggccatggcctttgaccgctatgtggccatctgctcccccctgcgatatgtcacaatcctcacaagcaaggtcattgggaagatcgtcactgccgccctgagccacagcttcatcattatgtttccatccatctttctccttgagcacctgcactattgccagatcaatatcattgcacacacattttgtgagcacatgggcattgcccatctgtcctgttctgatatctccatcaatgtctggtatgggttggcagctgctcttctctccacaggcctagacatcatgcttattactgtttcctacatccacatcctccaagcagtcttccgcctcctttctcaagatgcccgctccaaggccctgagtacctgtggatcccatatctgtgtcatcctactcttctatgtccctgcgcttttttctgtctttgcctacaggtttggtgggagaagcgtcccatgctatgtccatattctcctggccagcctctacgttgtcattcctcctatgctcaatcccgttatttatggagtgaggactaagccaatactggaaggggctaagcagatgttttcaaatcttgccaaaggatctaaataa

SEQ ID NO: 12 - protein, 335 aa, Homo sapiens
MAQVRALHKIMALFSANSIGAMNNSDTRIAGCFLTGIPGLEQLHIWLSIPFCIMYITALEGNGILICVILSQAILHEPMYIFLSMLASADVLLSTTTMPKALANLWLGYSLISFDGCLTQMFFIHFLFIHSAVLLAMAFDRYVAICSPLRYVTILTSKVIGKIVTAALSHSFIIMFPSIFLLEHLHYCQINIIAHTFCEHMGIAHLSCSDISINVWYGLAAALLSTGLDIMLITVSYIHILQAVFRLLSQDARSKALSTCGSHICVILLFYVPALFSVFAYRFGGRSVPCYVHILLASLYVVIPPMLNPVIYGVRTKPILEGAKQMFSNLAKGSK

SEQ ID NO: 13 - DNA, 6138 bp, Homo sapiens
agctgaggaactgcgtgtggagtcagcccagtctggatgcacaggaggatgctggcggcacagtgagtgaggcctggtgccagagctgtgcggaccccttgttggccatggagcagcaggcccagaggccctctccccagccctgcttgcctgcctcggagaggacagaggcctaggcccacgggggagggtgttggcagacagatgccctccaggccctggggcctccttaacggccccttaacgacacgcgtgccaagggtggaggatgccagccaaggggcgctacttcctcaacgagggcgaggagggccctgaccaagatgcgctctacgagaagtaccagctcaccagccagcatgggccgctgctgctcacgctcctgctggtggccgccactgcctgcgtggccctcatcatcattgccttcagccagggggacccctccagacaccaggccattctgggcatggcgttcctggtgctggcggtgtttgcggccctctctgtgctgatgtacgtcgagtgtctcctgcggcgctggctcagggccttggcgctgctcacctgggcctgcttggtggcgctgggctatgtgctggtgttcgacgcatggacaaaggcggcctgtgcgtgggagcaggtgcccttcttcctgttcattgtcttcgtggtgtacacactactgcccttcagcatgcggggcgctgtcgccgttggggccgtctccactgcctcccacctcctggtgctcggttctttgatgggaggcttcacgacacccagtgtccgggtggggctgcagctgctggccaacgcagtcatcttcctgtgtgggaacctgacaggcgccttccacaagcaccaaatgcaggatgcatcccgggacctcttcacctacactgtgaagtgcatccagatccgccggaagctgcgcatcgagaagcgccagcaggagaacctgctgctgtcagtgcttccggcccacatctccatgggcatgaagctggccatcatcgaacggctcaaggagcatggtgaccgtcgctgcatgcctgacaacaacttccacagcctctacgtcaagaggcaccagaatgtcagcatcctctatgcggacatcgtgggcttcacgcagctggccagcgactgttctcccaaggagctggtggtggtgctgaatgagctctttggcaagttcgaccagatcgccaaggccaacgagtgcatgcgaatcaagatcctcggcgactgctactactgtgtatcgggcctgcccgtgtcgctgcctacccacgcccggaactgcgtgaagatggggctggacatgtgccaggccatcaagcaggtgcgggaggccacgggcgtggacatcaacatgcgtgtgggcatacactcggggaatgtgctgtgcggggtcatcgggctgcgcaagtggcagtatgacgtgtggtcccacgacgtgtccctggccaaccggatggaggcagccggagtacccggccgggtgcacatcacggaggccacgctaaagcacctggacaaggcgtacgaggtggaggatgggcacgggcagcagcgggacccctacctcaaggagatgaacatccgcacctacctggtcatcgacccccggagccagcagccacccccgcccagccaacacctccccaggcccaagggggacgcggccctgaagatgcgggcgtcagtgcgcatgacccggtacctcgagtcctggggggcggcacggccctttgcacatctcaaccaccgtgagagcgtgagcagtggtgagacccacgtccccaacgggcggaggcctaagagcgttccccagcgccaccgccggaccccagacagaagcatgtcccccaaggggcggtcggaggatgactcgtacgatgacgagatgctgtcagccattgaggggctcagctccacgaggccctgctgctccaagtccgatgacttctacacctttgggtccatcttcctggagaagggctttgagcgcgagtaccgcctggcacccatcccccgggcccgccacgactttgcctgcgccagcctgatcttcgtctgcatcctgctcgtccatgtcctgctcatgcccaggacggcggcactgggtgtgtccttcgggctggtggcctgtgtactggggctggtgctgggcctgtgctttgccaccaagttctcgaggtgctgcccagctcgggggacgctctgcactatctctgagagggtggagacacagcccctgctgaggctgaccctggccgtcctgaccatcggcagcctgctcactgtggccatcatcaacctgcccctgatgcctttccaagttccagagctgcctgttggcaatgagacaggcctactggccgcgagcagcaagacaagagccctgtgtgagcccctcccgtactacacctgcagctgtgtcctgggcttcatcgcctgctcggtcttcctgaggatgagcctggagccaaaggttgtgctgctgacagtggccctggtggcctacctggtgctcttcaacctctccccatgctggcagtgggactgctgcggccaaggcctgggcaacctcaccaagcccaacggcaccaccagtggcacccctagctgttcctggaaggacctgaagaccatgaccaatttctacctggtcctgttctacatcaccctgcttacactctccagacagattgactattactgccgcttggactgcctatggaagaagaagttcaagaaggagcacgaggagtttgagaccatggagaacgtgaaccgccttcttctggagaacgtcctgccagcccacgtggctgcccactttatcggtgacaagttaaacgaggactggtaccatcagtcctatgactgcgtctgtgtcatgtttgcctccgtgccggacttcaaagtgttctacacagagtgcgatgtcaacaaagaagggctggagtgcctacgcctgctcaatgagatcattgccgacttcgacgagctcctactgaagcccaagttcagcggcgtggagaagatcaagaccatcggcagcacgtacatggcagctgcagggctcagcgtcgcctcagggcacgagaaccaggagctggagcggcagcatgcccacattggtgtcatggtggagttcagcatcgccctgatgagtaagctggacggcatcaacaggcactccttcaactccttccgcctccgcgtcggcataaaccatgggcctgtgattgctggagtgattggggcccgaaaacctcagtatgacatctggggaaacactgtcaatgtggccagccgaatggaaagcactggagaacttgggaaaatccaggttaccgaggagacctgcaccatcctccagggcctcgggtactcttgtgaatgccgtggcctgatcaacgtcaaaggcaaaggcgagctgaggacttactttgtctgtacggacactgccaagtttcaggggctggggctgaactgagggctcctgctggattccgaaaaggccgggaagccagtctccttccctgaagcaagcccaggagaagactctccgccccacgccaatcccaaaggcatgcagatggctgtgcatgttggcttctttggacctgcactggaggatttctcagacacatgcaccagattctggctcgaagcagccactgagccataatgcgcaggggaggccagaagctctgtgcctggtctgtaacagtttccaggccagctggagaatgttcactggttcggggctgactttgagatctttgttccctgaggtgccaggcaggcaactttagcacatgatgaaaacagacttccacctcagtggcctgtgggcacgcacaagtgaggtctgtttttctagacaccaagggggagtaagctgagctgtctagcacggattggagactccctctccctggtgggcctggcaatgacagcatttctcacagaggcattctggtaaatgaagctgaaaggggtgttttacatctgtaaacggtttcaaacaggtagagagaaaaacaccacaattaacactgttactttttgccttgtctggcatgtttgttttaaatgaatacattaatggggtttttatccttttgaatgacttttcagacactagacataaatctcttccctccagtgtatgctctgcctttttaaccactgacatgtaaggaggactactgtctagcatcagcttatggggtcagctggctgtggggatagagtcctgaggaatgtggtcacagcaagaaggcggggagcagcagagccttgcctttgaatgaggcagcttgtgaggcaagcattctggagagaggtgctttgaaagtaaggtgcggcctttcacctcttccttgattactcacacatctttgcgttctcccctgccgtccttcaactgtatcttacttttcttaccagaaaggaatggagtctgtttagagacaacttggacaacctgtgagtgcatctcttctttcctttagtcttcacagctaactctggagagcttcaaaactagaaggatctactccgcatgggtgcatgcagaggctcctggatctgggaagcccgccccctcacaaatgctgagccgttcttgctctgaaactgcgtgagtcaaggcaaatgcaaaaagccaggttttggggatgtgtcttactgtgcttcaacttcccaaggaattgaaagtcaacctaactgtaacaacagggtgagaaatgaccaaactgcccgtgactttttctgaatggacttcataaccggaagacttaaccggtggcctcatcaccagagcatcgccaggatttctaatgcactcagtttccctacatagcagggattcttagctaggtgtccccatgaaccccgtaaagttctacacaaagtcttgcatacaggagcctttacaagatgattatacagggttgcagattgggtgactgaccagacttgttggggtcctgggatgagttgccccgggctgcaaattaagagtacagctaagtgcgggggtggcggtggagggaacgaaaattgaacctgtctgcctgtgctgtgtcgtgtggctttatcagcccgaggaagggcaggtgtattctaatttgcacaaaggtgctgggtagactagtggcagctctcatgtgctgcacataagtggaatcagtatgaatagaagaacttgctgtataaaggaatttcatggcaacaatgctggtaagggcaattagcctcgcttaagttgccttttttacacaccaaaactttttacatgaagggctggtttcacatgaatactatactgaaatctgtgctctcaagatctagcagtgaccagggctgcccggcgggggctctcctggcaagtcaggaaggtttctgttgctaatataacatagaaacacattagtgcactgggcctctctgaggtcagcatatttgtactcttggaatatttgtttttttcttcagtaacaacagaaaccccagttgggagtttaacaaataactgactaccactcactcatgcatttttatttccaattaaagcaaagcactgtgctgtgctcagataataatagtttgtaagtaaaagtttttagttttcagtgttcaggttatagaatataactgaccataaaaattacctgcaggtattttctttttatgaacttgtttttaaattaccaagtaattactggtgtcattttgttttatgacagacacacgtatctaacaaacaaacaaacagtgaccttctccatgggtcaaggacttccttacaatttctcctgagttaacttttgtgaaaataatacctaaggttttctggcttattgaggaaatttcctaacaaacaaacaaacaaacaaacagaagagaagatcattaaccactgtatactttgtgtatataataggtcagtgtaaagaaatatgatttgaggtggtgcatgcaagtaactagggtttattctatataatgaatatttatagatctgtaacatttgtttcaaaatgctgtttcatttttataaagtaccagtgtttagctgctttttatacattaaattagcaatttgaaaaactc

SEQ ID NO: 14 - protein, 1080 aa, Homo sapiens
MPAKGRYFLNEGEEGPDQDALYEKYQLTSQHGPLLLTLLLVAATACVALIIIAFSQGDPSRHQAILGMAFLVLAVFAALSVLMYVECLLRRWLRALALLTWACLVALGYVLVFDAWTKAACAWEQVPFFLFIVFVVYTLLPFSMRGAVAVGAVSTASHLLVLGSLMGGFTTPSVRVGLQLLANAVIFLCGNLTGAFHKHQMQDASRDLFTYTVKCIQIRRKLRIEKRQQENLLLSVLPAHISMGMKLAIIERLKEHGDRRCMPDNNFHSLYVKRHQNVSILYADIVGFTQLASDCSPKELVVVLNELFGKFDQIAKANECMRIKILGDCYYCVSGLPVSLPTHARNCVKMGLDMCQAIKQVREATGVDINMRVGIHSGNVLCGVIGLRKWQYDVWSHDVSLANRMEAAGVPGRVHITEATLKHLDKAYEVEDGHGQQRDPYLKEMNIRTYLVIDPRSQQPPPPSQHLPRPKGDAALKMRASVRMTRYLESWGAARPFAHLNHRESVSSGETHVPNGRRPKSVPQRHRRTPDRSMSPKGRSEDDSYDDEMLSAIEGLSSTRPCCSKSDDFYTFGSIFLEKGFEREYRLAPIPRARHDFACASLIFVCILLVHVLLMPRTAALGVSFGLVACVLGLVLGLCFATKFSRCCPARGTLCTISERVETQPLLRLTLAVLTIGSLLTVAIINLPLMPFQVPELPVGNETGLLAASSKTRALCEPLPYYTCSCVLGFIACSVFLRMSLEPKVVLLTVALVAYLVLFNLSPCWQWDCCGQGLGNLTKPNGTTSGTPSCSWKDLKTMTNFYLVLFYITLLTLSRQIDYYCRLDCLWKKKFKKEHEEFETMENVNRLLLENVLPAHVAAHFIGDKLNEDWYHQSYDCVCVMFASVPDFKVFYTECDVNKEGLECLRLLNEIIADFDELLLKPKFSGVEKIKTIGSTYMAAAGLSVASGHENQELERQHAHIGVMVEFSIALMSKLDGINRHSFNSFRLRVGINHGPVIAGVIGARKPQYDIWGNTVNVASRMESTGELGKIQVTEETCTILQGLGYSCECRGLINVKGKGELRTYFVCTDTAKFQGLGLN

SEQ ID NO: 15 - DNA, 5677 bp, Homo sapiens
ctggagccgcgcctttgggttgggctgggctgggccgcgcaaccgccacgggaagacagccctcggggcggggagggagagggtggccgggccggggggaggccggggccagggaggagccgagtgcgcgctcggggcaggcggcggcgcggagcggtgcggcggcgggaggcggaggcgagggtgcgatggcgcggagcccgggacgcgcgtacgccctgctgcttctcctgatctgctttaacgttggaagtggacttcacttacaggtcttaagcacaagaaatgaaaataagctgcttcctaaacatcctcatttagtgcggcaaaagcgcgcctggatcaccgcccccgtggctcttcgggagggagaggatctgtccaagaagaatccaattgccaagatacattctgatcttgcagaagaaagaggactcaaaattacttacaaatacactggaaaagggattacagagccaccttttggtatatttgtctttaacaaagatactggagaactgaatgttaccagcattcttgatcgagaagaaacaccattttttctgctaacaggttacgctttggatgcaagaggaaacaatgtagagaaacccttagagctacgcattaaggttcttgatatcaatgacaacgaaccagtgttcacacaggatgtctttgttgggtctgttgaagagttgagtgcagcacatactcttgtgatgaaaatcaatgcaacagatgcagatgagcccaataccctgaattcgaaaatttcctatagaatcgtatctctggagcctgcttatcctccagtgttctacctaaataaagatacaggagagatttatacaaccagtgttaccttggacagagaggaacacagcagctacactttgacagtagaagcaagagatggcaatggagaagttacagacaaacctgtaaaacaagctcaagttcagattcgtattttggatgtcaatgacaatatacctgtagtagaaaataaagtgcttgaagggatggttgaagaaaatcaagtcaacgtagaagttacgcgcataaaagtgttcgatgcagatgaaataggttctgataattggctggcaaattttacatttgcatcaggaaatgaaggaggttatttccacatagaaacagatgctcaaactaacgaaggaattgtgacccttattaaggaagtagattatgaagaaatgaagaatcttgacttcagtgttattgtcgctaataaagcagcttttcacaagtcgattaggagtaaatacaagcctacacccattcccatcaaggtcaaagtgaaaaatgtgaaagaaggcattcattttaaaagcagcgtcatctcaatttatgttagcgagagcatggatagatcaagcaaaggccaaataattggaaattttcaagcttttgatgaggacactggactaccagcccatgcaagatatgtaaaattagaagatagagataattggatctctgtggattctgtcacatctgaaattaaacttgcaaaacttcctgattttgaatctagatatgttcaaaatggcacatacactgtaaagattgtggccatatcagaagattatcctagaaaaaccatcactggcacagtccttatcaatgttgaagacatcaacgacaactgtcccacactgatagagcctgtgcagacaatctgtcacgatgcagagtatgtgaatgttactgcagaggacctggatggacacccaaacagtggccctttcagtttctccgtcattgacaaaccacctggcatggcagaaaaatggaaaatagcacgccaagaaagtaccagtgtgctgctgcaacaaagtgagaaaaagcttgggagaagtgaaattcagttcctgatttcagacaatcagggttttagttgtcctgaaaagcaggtccttacactcacagtttgtgagtgtctgcatggcagcggctgcagggaagcacagcatgactcctatgtgggcctgggacccgcagcaattgcgctcatgattttggcctttctgctcctgctattggtaccacttttactgctgatgtgccattgcggaaagggcgccaaaggctttacccccatacctggcaccatagagatgctgcatccttggaataatgaaggagcaccacctgaagacaaggtggtgccatcatttctgccagtggatcaagggggcagtctagtaggaagaaatggagtaggaggtatggccaaggaagccacgatgaaaggaagtagctctgcttccattgtcaaagggcaacatgagatgtccgagatggatggaaggtgggaagaacacagaagcctgctttctggtagagctacccagtttacaggggccacaggcgctatcatgaccactgaaaccacgaagaccgcaagggccacaggggcttccagagacatggccggagctcaggcagctgctgttgcactgaacgaagaattcttaagaaattatttcactgataaagcggcctcttacactgaggaagatgaaaatcacacagccaaagattgccttctggtttattctcaggaagaaactgaatcgctgaatgcttctattggttgttgcagttttattgaaggagagctagatgaccgcttcttagatgatttgggacttaaattcaagacactagctgaagtttgcctgggtcaaaaaatagatataaataaggaaattgagcagagacaaaaacctgccacagaaacaagtatgaacacagcttcacattcactctgtgagcaaactatggttaattcagagaatacctactcctctggcagtagcttcccagttccaaaatctttgcaagaagccaatgcagagaaagtaactcaggaaatagtcactgaaagatctgtgtcttctaggcaggcgcaaaaggtagctacacctcttcctgacccaatggcttctagaaatgtgatagcaacagaaacttcctatgtcacagggtccactatgccaccaaccactgtgatcctgggtcctagccagccacagagccttattgtgacagagagggtgtatgctccagcttctaccttggtagatcagccttatgctaatgaaggtacagttgtggtcactgaaagagtaatacagcctcatgggggtggatcgaatcctctggaaggcactcagcatcttcaagatgtaccttacgtcatggtgagggaaagagagagcttccttgcccccagctcaggtgtgcagcctactctggccatgcctaatatagcagtaggacagaatgtgacagtgacagaaagagttctagcacctgcttccactctgcaatccagttaccagattcccactgaaaattctatgacggctaggaacaccacggtgtctggagctggagtccctggccctctgccagattttggtttagaggaatctggtcattctaattctaccataaccacatcttccaccagagttaccaagcatagcactgtacagcattcttactcctaaacagcagtcagccacaaactgacccagagtttaattagcagtgactaatttcatgtttccaatgtacctgatttttcatgagccttacagacacacagagacacatacacattgatcttaaaatttttctcagtcactgatatgcaaaggaccacactgtctctgcttccaggagtattttagaaatgttccacaatttactgaagacatagagatgatgctgctgcttaggtgccttttagcaagctatgcaaacaatcctgataaaacaagatacatagagagtcaatctggcttctgagaatttaccaagtgaacagagtacctagttcatcagccgtccagtaaagcaacccaggaaactgactgggtctctttgcctaccgtattaacattaaacattgatgttctgtattctgtactttactgcacccagcagactttcaacaactcattgatccaaagatacatgcacagtctgagcaccagctatggtgctcataacttctttaagacttgaaccctttcaatctgtgtgattcattaaattggaccattgatgataagaatacacattgtatgtttctgtgcacatgacagtgtgtgtgtgtgcacgtacatactgtatagtcttaaaaatagcattatactggccaggggtggtggctaacgcctgtaatcccagcactttgggaggccgaggcgggtggatcaactgtggtcaggagtttgagatcagccaggccaacctggtgaaaccccgtctctactaaaaatacaaaaattagctgggcgtgatggtgggcgcctgtaatcccagctacttgggaggctgaggcaggagaatcacttgaacccgggaggcggaggttgcagtgagccgagatcgcaccattgcactccagtctgggcaacagagtgagattccgtctcaaaaaaaaaaagaaaaggaaaaaaaaatagcattatacctcttccttgtctcaaccgccatgaaaattctgaacactccaaattcagttgaataatccaaaacaaaatttataagtataaaataattttacttcttatagtaatagtatactttaaaaagcctcagggtatattatcttctaaacagctacaattcagtgcagctacattaaccaactatgttctctagttgagaacaactaggcctatttcactgctgtgtagcctcagtgcctaacatgggtgccaaataaatattcgtagaattacactgaattgtaaaaaccattcgtttttgtttacaattgccaaaaatctcaaaaggccctgtatttatgtaattctttgaaattattattttattttgatttctcagttattgactggctgggtgtgacttagtacataagtactcaatattataaaaacctcaaataattgacttgattttacacaacatccttcccttttctacaagttaatttttttacaaatcatttgggttatctcctaaataggttatattttattgcttctagaaacaatgtttcaaaatatatgtgcattatcagtaataatttgtataaatatttcccacaacaattttcataattttcaaagactaatttcttgactgaagatattttgctagggaagtgaaactttaaaattttgtagattttaaaaaatattgttgaatggtgtcatgcaaaggatttatatagtgtgctcccactaactgtacagatcaggacacatatttttagacatctaagtctgtagcttaaatggaggttactcttccatcatctagaattgtttacttagtaattgttgtttcttttattattatagacttactatcagttttattttgccaagtatgcaacaggtatatcactagtatatgaaaatgtaaatatcacttgtgtactcaaacaaaagttggtcttaagcttccaccttgagcagccttggaaacctaacctgcctcttttagcataatcacattttctaaatgattttctttgttcctgaaaaagtgatttgtattagttttacatttgttttttggaagattatatttgtatatgtatcatcataaaatatttaaataaaaagtatctttagagtgaaaaaaaaaaaaaaaaaaaaaaaaa

SEQ ID NO: 16 - protein, 1118 aa, Homo sapiens
MARSPGRAYALLLLLICFNVGSGLHLQVLSTRNENKLLPKHPHLVRQKRAWITAPVALREGEDLSKKNPIAKIHSDLAEERGLKITYKYTGKGITEPPFGIFVFNKDTGELNVTSILDREETPFFLLTGYALDARGNNVEKPLELRIKVLDINDNEPVFTQDVFVGSVEELSAAHTLVMKINATDADEPNTLNSKISYRIVSLEPAYPPVFYLNKDTGEIYTTSVTLDREEHSSYTLTVEARDGNGEVTDKPVKQAQVQIRILDVNDNIPVVENKVLEGMVEENQVNVEVTRIKVFDADEIGSDNWLANFTFASGNEGGYFHIETDAQTNEGIVTLIKEVDYEEMKNLDFSVIVANKAAFHKSIRSKYKPTPIPIKVKVKNVKEGIHFKSSVISIYVSESMDRSSKGQIIGNFQAFDEDTGLPAHARYVKLEDRDNWISVDSVTSEIKLAKLPDFESRYVQNGTYTVKIVAISEDYPRKTITGTVLINVEDINDNCPTLIEPVQTICHDAEYVNVTAEDLDGHPNSGPFSFSVIDKPPGMAEKWKIARQESTSVLLQQSEKKLGRSEIQFLISDNQGFSCPEKQVLTLTVCECLHGSGCREAQHDSYVGLGPAAIALMILAFLLLLLVPLLLLMCHCGKGAKGFTPIPGTIEMLHPWNNEGAPPEDKVVPSFLPVDQGGSLVGRNGVGGMAKEATMKGSSSASIVKGQHEMSEMDGRWEEHRSLLSGRATQFTGATGAIMTTETTKTARATGASRDMAGAQAAAVALNEEFLRNYFTDKAASYTEEDENHTAKDCLLVYSQEETESLNASIGCCSFIEGELDDRFLDDLGLKFKTLAEVCLGQKIDINKEIEQRQKPATETSMNTASHSLCEQTMVNSENTYSSGSSFPVPKSLQEANAEKVTQEIVTERSVSSRQAQKVATPLPDPMASRNVIATETSYVTGSTMPPTTVILGPSQPQSLIVTERVYAPASTLVDQPYANEGTVVVTERVIQPHGGGSNPLEGTQHLQDVPYVMVRERESFLAPSSGVQPTLAMPNIAVGQNVTVTERVLAPASTLQSSYQIPTENSMTARNTTVSGAGVPGPLPDFGLEESGHSNSTITTSSTRVTKHSTVQHSYS

SEQ ID NO: 17 - DNA, 6771 bp, Homo sapiens
ggggggtctgctctgtgcggtgaagcttctcttcttggcacctgcctggcatcggaagagggccccttctccctccctgggcttttatgtggacactgtaatgcctcagttttctttctttctttttgtttttgacacagggtctcactctatcacccaagctggagtgcagtggcaccatcttagctcaccgcagcctcaaactccccagctcgggtgattcttcctgcctcagcctcctgagtagtagcagctgggaccacagacgtctgccaccaagcccagctgcaccgccagttccggggagggccctgggccagcggctgtccgccccccctcctttataaagtcctggcctcgggacagcccgcacagctgcccagcctgcggagacgggacagccctgtcccactcactctttcccctgctgctcctgccggcagctcagctggaaccatgggaggccgcgtctttctcgtctttctcgcattctgtgtctggctgactctgccgggagctgaaacccaggactccaggggctgtgcccggtggtgccctcaggactcctcgtgtgtcaatgccaccgcctgtcgctgcaatccagggttcagctctttttctgagatcatcaccacccccatggagacttgtgacgacatcaacgagtgtgcaacactgtcgaaagtgtcatgcggaaaattctcggactgctggaacacagaggggagctacgactgcgtgtgcagcccaggatatgagcctgtttctggggcaaaaacattcaagaatgagagcgagaacacgtgtcaagatgtggacgaatgtcagcagaacccaaggctctgtaaaagctacggcacctgcgtcaacaccctcggcagctacacgtgccagtgcctgcctggcttcaagctcaaacctgaggacccgaagctctgcacagatgtgaatgaatgcacctccggacaaaacccatgccacagctccacccactgcctcaacaacgtgggcagctatcagtgccgctgccgcccgggctggcaaccgattccggggtcccccaatggcccaaacaataccgtctgtgaagatgtggacgagtgcagctccgggcagcatcagtgtgacagctccaccgtctgcttcaacaccgtgggttcatacagctgccgctgccgcccaggctggaagcccagacacggaatcccgaataaccaaaaggacactgtctgtgaagatatgactttctccacctggaccccgccccctggagtccacagccagacgctttcccgattcttcgacaaagtccaggacctgggcagagactacaagccaggcttggccaataacaccatccagagcatcttacaggcgctggatgagctgctggaggcccctggggacctggagaccctgccccgcttacagcagcactgtgtggccagtcacctgctggatggcctagaggatgtcctcagaggcctgagcaagaacctttccaatgggctgttgaacttcagttatcctgcaggcacagaattgtccctggaggtgcagaagcaagtagacaggagtgtcaccttgagacagaatcaggcagtgatgcagctcgactggaatcaggcacagaaatctggtgacccaggcccttctgtggtgggccttgtctccattccagggatgggcaagttgctggctgaggcccctctggtcctggaacctgagaagcagatgcttctgcatgagacacaccagggcttgctgcaggacggctcccccatcctgctctcagatgtgatctctgcctttctgagcaacaacgacacccaaaacctcagctccccagttaccttcaccttctcccaccgttcagtgatcccgagacagaaggtgctctgtgtcttctgggagcatggccagaatggatgtggtcactgggccaccacaggctgcagcacaataggcaccagagacaccagcaccatctgccgttgcacccacctgagcagctttgccgtcctcatggcccactacgatgtgcaggaggaggatcccgtgctgactgtcatcacctacatggggctgagcgtctctctgctgtgcctcctcctggcggccctcacttttctcctgtgtaaagccatccagaacaccagcacctcactgcatctgcagctctcgctctgcctcttcctggcccacctcctcttcctcgtggcaattgatcaaaccggacacaaggtgctgtgctccatcatcgccggtaccttgcactatctctacctggccaccttgacctggatgctgctggaggccctgtacctcttcctcactgcacggaacctgacggtggtcaactactcaagcatcaacagattcatgaagaagctcatgttccctgtgggctacggagtcccagctgtgacagtggccatttctgcagcctccaggcctcacctttatggaacaccttcccgctgctggctccaaccagaaaagggatttatatggggcttccttggacctgtctgcgccatcttctctgtgaatttagttctctttctggtgactctctggattttgaaaaacagactctcctccctcaatagtgaagtgtccaccctccggaacacaaggatgctggcatttaaagcgacagctcagctgttcatcctgggctgcacgtggtgtctgggcatcttgcaggtgggtccggctgcccgggtcatggcctacctcttcaccatcatcaacagcctgcagggtgtcttcatcttcctggtgtactgcctcctcagccagcaggtccgggagcaatatgggaaatggtccaaagggatcaggaaattgaaaactgagtctgagatgcacacactctccagcagtgctaaggctgacacctccaaacccagcacggttaactagaaaaatcttctgaataagatcttccctctttgcccgtggaaaatctgaacaatctttgagccatctagaggggaaagaaaagactttgttctgtgtgtttcaagaaattcaccatgtcagcaatatgaaggatgttatggaaggcgtgctaggcattcaattcctgcagaaaccggaaatcttccatgccctgcaatgtgctcatcaaactctcagcatatggacggccagctgtggcccatatcttggtcactctgaagcacaatatttatgaagctatagaacgttaagacctctttcacagcctctccttcctacaaagactcctccaaatcttaaaatgaagcaggaaaacgagcctaagaggactttcataccgacaacatctgaaaggactagaatgttcacaccacgatctggatttcttaattttttgtttttgtttttgttgttctctagttctacgggtttgattatttagtcatgtgaaaaatattgattactcacacatagatcaagagagacacggctcctgccttcatggagcttttaggggaaaatgaagtggctcttgcagctagagttgactcagaagccgaaattcctagaaatcaggtttctactgctaggcaattgaagtataaactattttataaacactgtcttctttcgtcttcacaccaacatgcagaaaagtttctaatctcagatcggggatgtgcaacaaattccatttcaaaggaatgacctgcaaaactcctaaatattccaagcaaatgcccttaaccctgtctgttatctgctttccttgaacagaaattctacatgaccataaaacctcgaagatgggtatggcacagttcatgccctgtaatcctagcactttgggagggtgaggcaggaggatggctcaagcccaggagtttgagaccagtgtgggcaacagagtgagaaccatctctacccaaaaaaaaaattaaaaattagccaagcatggtgatgatataggagttaaggagaaatcatttaggcaaatagcaagggtaggaagtcctcagtaaggttttccatttaatgaaaagcagcccccaaaatcattttcttttctaacaaagaacagcctgtaaaatcgagctgcagacatagacaagcaagctggaagcttccacgggtgaatgccggcagctgtgccaataggaaaaagctacctagactaggcatgtccaaaatggcggctccaagttcccttctctttgccagccatgtgtacagtaaaaagcaggcaacatagtgtcagccaaagctcatttgcataataagattagggtggggtggccagctcacataggggtaggccctaggtaaatcagacaccgccttctcaagcctgtctataaaatctggtacactatgacgagggtcagatttcccattcagacgcccctctcccatgcaagagaaagagctgttctcctttctctttcttttgcctattaaacctctgctcctggccaggcacagtggctcacgcctataatcccagcactttgggaggctgaggtggtcagatcacctaaggtcaggagttcaagaccagcctggtcaacatggtgaaatcttgtctctagtaaaaatacaaaaatatatgaaatctcacatagatgataatattaagttccaaaagcaactcaacctggtagattctaattttttttgaggcagggtcttgctttgtcacccatgctggagtacaatggcacaaacactgctcactgcagcctcgacctcccaaggcctaagcaatcctcctgcctcagtccccctccaggtatttgaaactacaggtgtgtaccaccacaccgggctaatttttgtattttttgtagagacgtgggtctcactatgctgcccaggctcaggtcttaatctcctgagctcaggcaatccgcaggcctcagcctccctaagtgcggggattacaggcttgagccactgcacctagcctctatttgttttacaaaagagaaattgagatcctgaatgttaagtgacttgcctgaggccatcccactaacaggagccagggttaggattcaaaccccatccaactggtcccagagctggagcttcttgcactgccctacactacctaccatctccatcctctgggcacctttttataagaaccaaaacattacagagcattgctttgtcaactcagctgggaacatttcccagtgcaactcacatttttcactgctctgtgcctgtccgtataagctcaatgagtattgatttaggggctttggagaactttgaatgctaccccccaagtaaccattgttggcaacctggtacctctacttttagccatttctccttctctataaatagtgcagaagtaacccacttggtaacaggcatccttgccaagcctccaccactaggtcagtgtaagaattaaagaaagaggaaagaaacacaaaaagtggcttgatggttaagacaggtttattttagagaaaacacacctgagaggggctgctggctgaattaggttagagtcttttctacagactaagagtgtttaaggatttagggtgggagagtttcttagaggcttggactgcttctgtgttttttttgttgtgcttatatgggagggagagtggtgtgtttgcttttatacatttttctgcagctgtaggcataccccccaagtctgcttttagcttccctattttagtgcacctggagggaaaggaatgtgcttattaaggcccactgttttactggggcccattgtatgagggtgaagtttggcagttacccaagagacttttcctccaccttcctctgtgcccgagctgttttatctgcattttactgtctgctttttttggctgcttatagtttttaaaaaagtaatttccttaaatccagaaggctaaaaatgaagctgaaacttaaagtggcggtgtttgtccaaaataacggggctcctgctctgccagtcagtaccctcaagtcactcctgatcctcaacctccatgcctaaggctggttcaagagaccacataatatctgccttttattacatacatgatgggtgcatgggattctgcgtgccctttgcttgatatagactgctaaggtgagatggggaatatcagagtcagctgctgcttgaggaagcagaacacacagctggaggcttggaacatgtgggtccctatgagtgtagagcccatatccccatagagtctacctagagcaggggtcgccaaatgttttcttaaagagcctgatagtgtatatgttaggctttgtgagccaggtatttacagcaactcaattctaccactgtggtatgaaaacagctatagacaatcataaatgaatgatcatggctatgttttaataaaactttacagacactgaacttgaacttccattgtgatatgaaaacagctatagacaatcataaatgaatgatcatggctatgttttaataaaactttatggacactgagcttgaacttcatatatcagtcatgtgacacaaaatatcattcttctttttatttgttttcacccatttgaaaaatgtaaaaactattcttagctgtacagaaacagatggtgggtcagatttgactcactgcccatagtttccagaccatgatgttcaggttcatggaagcacttcactctacactaatttattcatccattcatcacatatgtgatgagcacatacagacacacctcagagatattgcaggctccactccagatcaccacaataatgtgaatattgcaataaagcaagtcatacacatt

SEQ ID NO: 18 - protein, 823 aa, Homo sapiens
MGGRVFLVFLAFCVWLTLPGAETQDSRGCARWCPQDSSCVNATACRCNPGFSSFSEIITTPMETCDDINECATLSKVSCGKFSDCWNTEGSYDCVCSPGYEPVSGAKTFKNESENTCQDVDECQQNPRLCKSYGTCVNTLGSYTCQCLPGFKLKPEDPKLCTDVNECTSGQNPCHSSTHCLNNVGSYQCRCRPGWQPIPGSPNGPNNTVCEDVDECSSGQHQCDSSTVCFNTVGSYSCRCRPGWKPRHGIPNNQKDTVCEDMTFSTWTPPPGVHSQTLSRFFDKVQDLGRDYKPGLANNTIQSILQALDELLEAPGDLETLPRLQQHCVASHLLDGLEDVLRGLSKNLSNGLLNFSYPAGTELSLEVQKQVDRSVTLRQNQAVMQLDWNQAQKSGDPGPSVVGLVSIPGMGKLLAEAPLVLEPEKQMLLHETHQGLLQDGSPILLSDVISAFLSNNDTQNLSSPVTFTFSHRSVIPRQKVLCVFWEHGQNGCGHWATTGCSTIGTRDTSTICRCTHLSSFAVLMAHYDVQEEDPVLTVITYMGLSVSLLCLLLAALTFLLCKAIQNTSTSLHLQLSLCLFLAHLLFLVAIDQTGHKVLCSIIAGTLHYLYLATLTWMLLEALYLFLTARNLTVVNYSSINRFMKKLMFPVGYGVPAVTVAISAASRPHLYGTPSRCWLQPEKGFIWGFLGPVCAIFSVNLVLFLVTLWILKNRLSSLNSEVSTLRNTRMLAFKATAQLFILGCTWCLGILQVGPAARVMAYLFTIINSLQGVFIFLVYCLLSQQVREQYGKWSKGIRKLKTESEMHTLSSSAKADTSKPSTVN

SEQ ID NO: 19 - DNA, 5523 bp, Homo sapiens
aagctattgaagctgacacccacagagttaaactcagttgctgaagccaccagctccccctcccagtccttcttttcagagtaggctggcagctgtcctaactgcctactaaagccaaatgcttgaggagagagagagagtaaggagccagccatgaatcctttccagaaaaatgagtccaaggaaactcttttttcacctgtctccattgaagaggtaccacctcgaccacctagccctccaaagaagccatctccgacaatctgtggctccaactatccactgagcattgccttcattgtggtgaatgaattctgcgagcgcttttcctattatggaatgaaagctgtgctgatcctgtatttcctgtatttcctgcactggaatgaagatacctccacatctatataccatgccttcagcagcctctgttattttactcccatcctgggagcagccattgctgactcgtggttgggaaaattcaagacaatcatctatctctccttggtgtatgtgcttggccatgtgatcaagtccttgggtgccttaccaatactgggaggacaagtggtacacacagtcctatcattgatcggcctgagtctaatagctttggggacaggaggcatcaaaccctgtgtggcagcttttggtggagaccagtttgaagaaaaacatgcagaggaacggactagatacttctcagtcttctacctgtccatcaatgcagggagcttgatttctacatttatcacacccatgctgagaggagatgtgcaatgttttggagaagactgctatgcattggcttttggagttccaggactgctcatggtaattgcacttgttgtgtttgcaatgggaagcaaaatatacaataaaccaccccctgaaggaaacatagtggctcaagttttcaaatgtatctggtttgctatttccaatcgtttcaagaaccgttctggagacattccaaagcgacagcactggctagactgggcggctgagaaatatccaaagcagctcattatggatgtaaaggcactgaccagggtactattcctttatatcccattgcccatgttctgggctcttttggatcagcagggttcacgatggactttgcaagccatcaggatgaataggaatttggggttttttgtgcttcagccggaccagatgcaggttctaaatccccttctggttcttatcttcatcccgttgtttgactttgtcatttatcgtctggtctccaagtgtggaattaacttctcatcacttaggaaaatggctgttggtatgatcctagcatgcctggcatttgcagttgcggcagctgtagagataaaaataaatgaaatggccccagcccagccaggtccccaggaggttttcctacaagtcttgaatctggcagatgatgaggtgaaggtgacagtggtgggaaatgaaaacaattctctgttgatagagtccatcaaatcctttcagaaaacaccacactattccaaactgcacctgaaaacaaaaagccaggattttcacttccacctgaaatatcacaatttgtctctctacactgagcattctgtgcaggagaagaactggtacagtcttgtcattcgtgaagatgggaacagtatctccagcatgatggtaaaggatacagaaagcagaacaaccaatgggatgacaaccgtgaggtttgttaacactttgcataaagatgtcaacatctccctgagtacagatacctctctcaatgttggtgaagactatggtgtgtctgcttatagaactgtgcaaagaggagaataccctgcagtgcactgtagaacagaagataagaacttttctctgaatttgggtcttctagactttggtgcagcatatctgtttgttattactaataacaccaatcagggtcttcaggcctggaagattgaagacattccagccaacaaaatgtccattgcgtggcagctaccacaatatgccctggttacagctggggaggtcatgttctctgtcacaggtcttgagttttcttattctcaggctccctctagcatgaaatctgtgctccaggcagcttggctattgacaattgcagttgggaatatcatcgtgcttgttgtggcacagttcagtggcctggtacagtgggccgaattcattttgttttcctgcctcctgctggtgatctgcctgatcttctccatcatgggctactactatgttcctgtaaagacagaggatatgcggggtccagcagataagcacattcctcacatccaggggaacatgatcaaactagagaccaagaagacaaaactctgatgactccctagattctgtcctgaccccaattcctggccctgtcttgaagcattttttttcttctactggattagacaagagagatagcagcatatcagagctgatctcctccacctttctccaatgacagaagttccaggactggttttccagtacatctttaaacaaggccccagagactctatgtctgcccgtccatcagtgaactcattaaaacttgtgcagtgttgctggagctggcctggtgtctccaaatgaccatgaaaatacacacgtataatggagatcattctctgtgggtatgcaaagttatgggaattcctttataggtaactgccatttaggactgatggccctaatttttgaggtgctgatttagaggcaaaattgcagaataacaaagaaatggtatttcaagtttttttttttataagcaatgtaattatgctattcacaggggcctcaagaattggtatgtatgatgtgatctggtccagccagggcctggcttgtcagctctctaggtttgatatgactttagtaaatttgtcaatatagatggtaggaagcagaatgccattttattaaaacacaggagaagttatatctctctgattatgatagtattttatttacttatccaaaccctcctttctcagtatggatagatcatggaaaccagattagagatagtaagcattagtaaacattgttctggagaacaggaacaggtgtaagttgtagaaatcctgaagagccagtcattcttttacagagtacattcttcttagcctctatggcgctggtctatgcccttcagtgaacagttgtataaacaataattataatttgcaaccttgtcttgtcaaccttgctgatccagctttttcttattattacaccttgtcttgcttattgcagcaaatattcaataacaacaatgtttctataagtccaacttcctttattaatgtttccatttagcctcaaaaatatcaaagtagttcctttttgatgttgttttcctgatttacttttcccataagttttaaataccatttctgccttgaagcctagaaattttctttttattcaaaaaaagttacattaatgctctaggtttgaggttctaaaatggaaatgtcaatagaggagcatggtcctatgtgaggttcctatcaaaatttgtgggagtagggatggtagagcatgagggttttgtttgtgtatgtgtatggtcatgaaaaaaaattgagaaacattacctcatacacaatgaatgaatcagaggacagacacgggaatggcacgactgtgcagtgtgttactaggaaaaaagttcagaatcactgttctagagagcttcatttccattggttttaaaacattattctcatgtagaacagtgttgggtctcatactgttaatgttaatacgtaacaatgttcatgttaacaggcacctgttaatattaacagataatgttactgttaacaggtaagagaaattgctctaagtgcccaaactttatatacttcagttttaatgacaagcatttcagaaatataagagcggcagccagaccaaccagtttttccagatatcttgatgtgaacctgaccctactcctttagaagacagcctgttcatttttaaatagctttaacccaaactgttctatgaccattgtttcaagagacattaacacagttctgtaaatagaagtgtctatggacaaataagtttgggaaatgtggcatactgtatccttttcttaacatttgcatattaaagactctgagatatcctgcagtaaagacacaagataccttgtttaaattaacatgtacgctgcagaacattggtttggaaaaaactgttgagcagttcttccttgtaagtgctgagcttcctctctgaaacctcctaccattgttttttttcccctgtagctaacaagaataagtataacagccggccaggcacagtggctcatgcctgtaatcccagcactttgggaggctgagacaggtggatcacctgaggtcaggagttcgagaccagcctggccaacatggtgaaaccgtgtctctactaaaagtacaaaaattagccaggtgtgatggcaggtgcctgtaatcccagctactcgggaggctgaagcagaagaattgcttgaacccgggaggcagaggttgcaatgagccgagatcacgccatcacactctagcctgggggacaagagtgagacttcatctaaaaaaaaaaagaaaagaatatgtataccccctttttcatgtggcagatgtttagctatttggggagaactttcatggctcttccctaatcatcaagtattcaaggtaaagattctcggttcctgtaatggttcctcaccaggcataatttgtccttttaccatcctactttctgtcttctgaaaaacattctttatctgaaatacagcaattaatattaagatatcttaatatgaagtgcctggagtcaaatataacattccaaagtagtctgactggaagaactagcacctgcctttcttcaaacaatgcacttctgttaatgcagtgtaaggtaacatgagttgtttttggaaactacatcataatgtgggcttacattctagcacttatcacttaatgacagggatacatttgaggaatgcattgttaggcaattttgtcattatgcaaacatcatagagtgtacttacacaaacctatggtatagcctactacacatctaagttatatggtatagactgtttctccagctatatggtgtagactgtttctcctaggctacaaacctgcacagcatgttactgtattaaatgctgtaggcaattgtaacacaatggtatttttatacttaaacatatctaaacatagaaacggtacaaaaaactttacacattatatagatgtatcaaattattcatatgtgctctgaaaatgtctatatctgttatgtatcaattttttaaaaagtgaatgacataattcatttgaaaaaatgtggacacacaaattggaaaagaggtataaatgcagtattataatctaatgggaccaccatcacatatttggtctgtcattgactgaaactgcaatatagagtttttcttaacatttgcatattaaagactctgactatatatgg

SEQ ID NO: 20 - protein, 729 aa, Homo sapiens
MNPFQKNESKETLFSPVSIEEVPPRPPSPPKKPSPTICGSNYPLSIAFIVVNEFCERFSYYGMKAVLILYFLYFLHWNEDTSTSIYHAFSSLCYFTPILGAAIADSWLGKFKTIIYLSLVYVLGHVIKSLGALPILGGQVVHTVLSLIGLSLIALGTGGIKPCVAAFGGDQFEEKHAEERTRYFSVFYLSINAGSLISTFITPMLRGDVQCFGEDCYALAFGVPGLLMVIALVVFAMGSKIYNKPPPEGNIVAQVFKCIWFAISNRFKNRSGDIPKRQHWLDWAAEKYPKQLIMDVKALTRVLFLYIPLPMFWALLDQQGSRWTLQAIRMNRNLGFFVLQPDQMQVLNPLLVLIFIPLFDFVIYRLVSKCGINFSSLRKMAVGMILACLAFAVAAAVEIKINEMAPAQPGPQEVFLQVLNLADDEVKVTVVGNENNSLLIESIKSFQKTPHYSKLHLKTKSQDFHFHLKYHNLSLYTEHSVQEKNWYSLVIREDGNSISSMMVKDTESRTTNGMTTVRFVNTLHKDVNISLSTDTSLNVGEDYGVSAYRTVQRGEYPAVHCRTEDKNFSLNLGLLDFGAAYLFVITNNTNQGLQAWKIEDIPANKMSIAWQLPQYALVTAGEVMFSVTGLEFSYSQAPSSMKSVLQAAWLLTIAVGNIIVLVVAQFSGLVQWAEFILFSCLLLVICLIFSIMGYYYVPVKTEDMRGPADKHIPHIQGNMIKLETKKTKL

SEQ ID NO: 21 - DNA, 3828 bp, Homo sapiens
gggtggagggcccgggcgctcgggcctcaccagcccgagccaacttgcgctagagtcgggcccgccccctaaggggttaatccttttctcatgttaccgagcggcttataaggagggggaggccaagcctccgccttattgggagcctttgggggtttattctcttcccttctaacttgattaagaatgacccaaaataaattaaagctttgttccaaagccaatgtgtatactgaagtgcctgatggaggatggggctgggcggtagctgtttcatttttcttcgttgaagtcttcacctacggcatcatcaagacatttggtgtcttctttaatgacttaatggacagttttaatgaatccaatagcaggatctcatggataatctcaatctgtgtgtttgtcttaacattttcagctcccctcgccacagtcctgagcaatcgtttcggacaccgtctggtagtgatgttgggggggctacttgtcagcaccgggatggtggccgcctccttctcacaagaggtttctcatatgtacgtcgccatcggcatcatctctggtctgggatactgctttagttttctcccaactgtaaccatcctatcacaatattttggcaaaagacgttccatagtcactgcagttgcttccacaggagaatgtttcgctgtgtttgctttcgcaccagcaatcatggctctgaaggagcgcattggctggagatacagcctcctcttcgtgggcctactacagttaaacattgtcatcttcggagcactgctcagacccatctttatcagaggaccagcgtcaccgaaaatagtcatccaggaaaatcggaaagaagcgcagtatatgcttgaaaatgagaaaacacgaacctcaatagactccattgactcaggagtagaactaactacctcacctaaaaatgtgcctactcacactaacctggaactggagccgaaggccgacatgcagcaggtcctggtgaagaccagccccaggccaagcgaaaagaaagccccgctattagacttctccattttgaaagagaaaagttttatttgttatgcattatttggtctctttgcaacactgggattctttgcaccttccttgtacatcattcctctgggcattagtctgggcattgaccaggaccgcgctgcttttttattatctacgatggccattgcagaagttttcggaaggatcggagctggttttgtcctcaacagggagcccattcgtaagatttacattgagctcatctgcgtcatcttattgactgtgtctctgtttgcctttacttttgctactgaattctggggtctaatgtcatgcagcatattttttgggtttatggttggaacaataggagggactcacattccactgcttgctgaggatgatgtcgtgggcattgagaagatgtcttctgcagctggggtctacatcttcattcagagcatagcaggactggctggaccgccccttgcaggtttgttggtggaccaaagtaagatctacagcagggccttctactcctgcgcagctggcatggccctggctgctgtgtgcctcgccctggtgagaccgtgtaagatgggactgtgccagcatcatcactcaggtgaaacaaaggtagtgagccatcgtgggaagactttacaggacatacctgaagactttctggaaatggatcttgcaaaaaatgagcacagagttcacgtgcaaatggagccggtatgacacactttcttacaacaacagccactgtgttggctggagagggatggggtgggcccaacggggacacaaggaggcagaggagctaacccctctactccactttcaaaactacattttaaagggaatgtgtatgtgaagagcactaccaacatcgcttttgttttgttttgttttgttttaagctttttttttttgcttgtttttaaagccaaaacaaaaaacaaccaagcactcttccatatataaatctggctgtattcagtagcaatacaagagatatgtagaaagactctttggttcacattccgatattaaaatagtgacatgaactggcaaagtggttttaaaagctttcacgtgggataaatgattttctttttttcttttctttcttcctatggtcttgtctgaataaactactctcctgaataaaacaacatccaacccaggtcattgaaatgaaattggccagtcaaaaaaaaaaagacttcaatcatttttaaaattcctaattttcagaaatatgaataaatagtttttgttaaaccctttgtaaaataccaaggttcccgttaacaaattacggcctctgcttgctggaaatgaaatatagtttaagaccaaacattttactaataaacaaattttaagtatatatatatatatataacttgaacttcataaatgtgaagattaccacttctttttatggccagtccttatcagaagtgtttcagtacagaatatacaaaatggcatttaaaaatgtgtttcctgttgcttttagttatacagaaatatgtgactgtagtgtctttaatttaaaccgctatttattattaagttattctaggatgattaaagtaatcaaaagaaataaaatctgagacataagcagcatttttacctcctttctgcaatcctttaaatgcctcacagaatacgtcttatcttgtaaaaatactttcataaaaggccaagttgtcatgattcttccatttgattaggggcaacgtgtgctattaaaggggaaaaaataatggattgcaaatcgccttagctttcaaaactaatttgttttatcatttaagaatacttgaggaacttctttgatcagaattatatttcagagaattgttaaagcatttctgatttaaagaaaaaaccatctaattattgaagcatttctgtatttcacatgggggtaacagagacaattatgttatagcgagttacaagttgcaatttacatcttctataacacatgacttgattggtctaagttgccagaggtatcgggtaactggtcattgttttgttttgtttgttttattcttcctttttttttggagtcacactacatgtatagtattgctcacgttagcagttttctgtaaggagggcaagtgtcaggataataggtggactttttactcacctattttaccacaatctcaccctgcaggtgatggtcaatgcttgctgctccatctttattcatcgttaatgttaatttatgacaactcagggggaaaaacataacaagcctagtttggttacaggtacacacaagcttgaatatttctctgcactgaaatgaaagtggcatagttcatcaccacctgctacattttgtagagcatcttatcagccatagaaataggacaatctataaaactttggggagggtgggggaggaaatgacaaagtgtctgtcaaaaacaggcataatctaaaacaaggtggatgtagcaaatctctgtcactgcttgagaactttgagcttgtggcagttttgcagacttacatgacttcagcactttacgacatattttttactatgaatgttcaatacaatttaatatttataactgatttctgagggatctgctccatgtctattctgttatctgcatgaaaacaaaatgtatgccaatttcagtatgtcaataatcaaggttttaaatgtttggaagaaaatacaaacaagattgctgatctgttctgtattagtgacattctggtacttctagatttgcaataaatttatggattttttatttaaagaga

SEQ ID NO: 22 - protein, 523 aa, Homo sapiens
MTQNKLKLCSKANVYTEVPDGGWGWAVAVSFFFVEVFTYGIIKTFGVFFNDLMDSFNESNSRISWIISICVFVLTFSAPLATVLSNRFGHRLVVMLGGLLVSTGMVAASFSQEVSHMYVAIGIISGLGYCFSFLPTVTILSQYFGKRRSIVTAVASTGECFAVFAFAPAIMALKERIGWRYSLLFVGLLQLNIVIFGALLRPIFIRGPASPKIVIQENRKEAQYMLENEKTRTSIDSIDSGVELTTSPKNVPTHTNLELEPKADMQQVLVKTSPRPSEKKAPLLDFSILKEKSFICYALFGLFATLGFFAPSLYIIPLGISLGIDQDRAAFLLSTMAIAEVFGRIGAGFVLNREPIRKIYIELICVILLTVSLFAFTFATEFWGLMSCSIFFGFMVGTIGGTHIPLLAEDDVVGIEKMSSAAGVYIFIQSIAGLAGPPLAGLLVDQSKIYSRAFYSCAAGMALAAVCLALVRPCKMGLCQHHHSGETKVVSHRGKTLQDIPEDFLEMDLAKNEHRVHVQMEPV

SEQ ID NO: 23 - DNA, 3400 bp, Homo sapiens
gcccccaggagacccagaggacaactgggcaaggtgggccggagagtgtgggggaaggcaaaggagttctgtgagctcagcgtctgaagctcatttcatgcatcaggccccagggctcagcttccgccttcggcttccccttctgccaagagccctgagccactcacagcacgaccagagaacaggcctgtctcaggcaggccctgcgcctcctatgcggagatgctactgccactgctgctgtcctcgctgctgggcgggtcccaggctatggatgggagattctggatacgagtgcaggagtcagtgatggtgccggagggcctgtgcatctctgtgccctgctctttctcctacccccgacaagactggacagggtctaccccagcttatggctactggttcaaagcagtgactgagacaaccaagggtgctcctgtggccacaaaccaccagagtcgagaggtggaaatgagcacccggggccgattccagctcactggggatcccgccaaggggaactgctccttggtgatcagagacgcgcagatgcaggatgagtcacagtacttctttcgggtggagagaggaagctatgtgagatataatttcatgaacgatgggttctttctaaaagtaacagccctgactcagaagcctgatgtctacatccccgagaccctggagcccgggcagccggtgacggtcatctgtgtgtttaactgggcctttgaggaatgtccacccccttctttctcctggacgggggctgccctctcctcccaaggaaccaaaccaacgacctcccacttctcagtgctcagcttcacgcccagaccccaggaccacaacaccgacctcacctgccatgtggacttctccagaaagggtgtgagcgcacagaggaccgtccgactccgtgtggcctatgcccccagagaccttgttatcagcatttcacgtgacaacacgccagccctggagccccagccccagggaaatgtcccatacctggaagcccaaaaaggccagttcctgcggctcctctgtgctgctgacagccagccccctgccacactgagctgggtcctgcagaacagagtcctctcctcgtcccatccctggggccctagacccctggggctggagctgcccggggtgaaggctggggattcagggcgctacacctgccgagcggagaacaggcttggctcccagcagcgagccctggacctctctgtgcagtatcctccagagaacctgagagtgatggtttcccaagcaaacaggacagtcctggaaaaccttgggaacggcacgtctctcccagtactggagggccaaagcctgtgcctggtctgtgtcacacacagcagccccccagccaggctgagctggacccagaggggacaggttctgagcccctcccagccctcagaccccggggtcctggagctgcctcgggttcaagtggagcacgaaggagagttcacctgccacgctcggcacccactgggctcccagcacgtctctctcagcctctccgtgcactactccccgaagctgctgggcccctcctgctcctgggaggctgagggtctgcactgcagctgctcctcccaggccagcccggccccctctctgcgctggtggcttggggaggagctgctggaggggaacagcagccaggactccttcgaggtcacccccagctcagccgggccctgggccaacagctccctgagcctccatggagggctcagctccggcctcaggctccgctgtgaggcctggaacgtccatggggcccagagtggatccatcctgcagctgccagataagaagggactcatctcaacggcattctccaacggagcgtttctgggaatcggcatcacggctcttcttttcctctgcctggccctgatcatcatgaagattctaccgaagagacggactcagacagaaaccccgaggcccaggttctcccggcacagcacgatcctggattacatcaatgtggtcccgacggctggccccctggctcagaagcggaatcagaaagccacaccaaacagtcctcggacccctcttccaccaggtgctccctccccagaatcaaagaagaaccagaaaaagcagtatcagttgcccagtttcccagaacccaaatcatccactcaagccccagaatcccaggagagccaagaggagctccattatgccacgctcaacttcccaggcgtcagacccaggcctgaggcccggatgcccaagggcacccaggcggattatgcagaagtcaagttccaatgagggtctcttaggctttaggactgggacttcggctagggaggaaggtagagtaagaggttgaagataacagagtgcaaagtttccttctctccctctctctctctctttctctctctctctctctttctctctcttttaaaaaaacatctggccagggcacagtggctcacgcctgtaatcccagcactttgggaggttgaggtgggcagatcgcctgaggtcgggagttcgagaccagcctggccaacttggtgaaaccccgtctctactaaaaatacaaaaattagctgggcatggtggcaggcgcctgtaatcctacctacttgggaagctgaggcaggagaatcacttgaacctgggagacggaggttgcagtgagccaagatcacaccattgcacgccagcctgggcaacaaagcgagactccatctcaaaaaaaaaatcctccaaatgggttgggtgtctgtaatcccagcactttgggaggctaaggtgggtggattgcttgagcccaggagttcgagaccagcctgggcaacatggtgaaaccccatctctacaaaaaatacaaaacatagctgggcttggtggtgtgtgcctgtagtcccagctgtcagacatttaaaccagagcaactccatctggaataggagctgaataaaatgaggctgagacctactgggctgcattctcagacagtggaggcattctaagtcacaggatgagacaggaggtccgtacaagatacaggtcataaagactttgctgataaaacagattgcagtaaagaagccaaccaaatcccaccaaaaccaagttggccacgagagtgacctctggtcgtcctcactgctacactcctgacagcaccatgacagtttacaaatgccatggcaacatcaggaagttacccgatatgtcccaaaagggggaggaatgaataatccaccccttgtttagcaaataagcaagaaataaccataaaagtgggcaaccagcagctctaggcgctgctcttgtctatggagtagccattcttttgttcctttactttcttaataaacttgctttcaccttaaaaaaa

SEQ ID NO: 24 - protein, 697 aa, Homo sapiens
MLLPLLLSSLLGGSQAMDGRFWIRVQESVMVPEGLCISVPCSFSYPRQDWTGSTPAYGYWFKAVTETTKGAPVATNHQSREVEMSTRGRFQLTGDPAKGNCSLVIRDAQMQDESQYFFRVERGSYVRYNFMNDGFFLKVTALTQKPDVYIPETLEPGQPVTVICVFNWAFEECPPPSFSWTGAALSSQGTKPTTSHFSVLSFTPRPQDHNTDLTCHVDFSRKGVSAQRTVRLRVAYAPRDLVISISRDNTPALEPQPQGNVPYLEAQKGQFLRLLCAADSQPPATLSWVLQNRVLSSSHPWGPRPLGLELPGVKAGDSGRYTCRAENRLGSQQRALDLSVQYPPENLRVMVSQANRTVLENLGNGTSLPVLEGQSLCLVCVTHSSPPARLSWTQRGQVLSPSQPSDPGVLELPRVQVEHEGEFTCHARHPLGSQHVSLSLSVHYSPKLLGPSCSWEAEGLHCSCSSQASPAPSLRWWLGEELLEGNSSQDSFEVTPSSAGPWANSSLSLHGGLSSGLRLRCEAWNVHGAQSGSILQLPDKKGLISTAFSNGAFLGIGITALLFLCLALIIMKILPKRRTQTETPRPRFSRHSTILDYINVVPTAGPLAQKRNQKATPNSPRTPLPPGAPSPESKKNQKKQYQLPSFPEPKSSTQAPESQESQEELHYATLNFPGVRPRPEARMPKGTQADYAEVKFQ

SEQ ID NO: 25 - DNA, 2122 bp, Homo sapiens
gcgggacacagtctcttctcctctgctcttctttgggcaggtctctgggtctcaaagtttccgtctgctctgtgcagagggagtggagctccgagggcttgtggcttcgcagttcctcttctgtgaacagccgagatcacgcgctcctccccagccacccgttcctccccgcagtccttcccctccactcccttccccttctctgctcatgcagggagcccaggaagcctccgcctcagagatgctaccgctgctgctgcccctgctgtgggcaggggccctggctcaggagcggagattccagctggaggggccagagtcactgacggtgcaggagggtctgtgcgtcctcgtaccctgcagattgcccactacccttccagcctcgtactatggttatggctactggttcctggaaggggctgatgttccagtggccacaaacgacccagacgaagaagtgcaggaggagacccggggccgattccacctcctctgggatcccagaaggaagaactgctccctgagcatcagagatgcccggaggagggacaatgctgcatacttctttcggttgaagtccaaatggatgaaatacggttatacatcttccaagctctctgtgcgtgtgatggccctgacccacaggcccaacatctccatcccagggaccctggagtctggccatcccagcaatctgacctgctctgtgccctgggtctgtgagcaggggacgccccccatcttctcctggatgtcagctgcccccacctccctgggccccaggaccacccagtcctcggtgctcacaatcaccccacggccccaggaccacagcaccaacctcacctgtcaggtgacgttccctggagccggtgtgaccatggagagaaccatccagctcaatgtctcctatgctccacagaaagtggccatcagcatcttccaaggaaacagcgcagccttcaaaatcctgcaaaacacctcgtccctccctgtcctggagggccaggctctgcggctgctctgtgatgctgacggcaacccccctgcacacctgagctggttccagggcttccccgccctgaacgccacccccatctccaataccggggtcctggagctgcctcaagtagggtctgcagaagaaggagatttcacctgccgtgctcagcatcctctgggctccctgcaaatctctctgagtctctttgtgcattggaaaccagaaggcagggctggtggtgtcctgggagcagtctggggagctagcatcacaaccctggttttcctctgtgtttgcttcatcttcagagtgaagactagaaggaagaaagcagcccagccagtgcaaaacacggatgatgtgaaccccgtcatggtctcaggctccaggggtcatcagcaccagttccagacaggcatagtttcagaccaccctgctgaggctggccccatctcagaagatgagcaggagctccactacgctgtcctacacttccacaaggtgcaacctcaggaaccaaaggtcaccgacactgagtactcagaaatcaagatacacaagtgaggaattgtccaaagccataaccttgattggagagaacatggtacctctcagtgtattggttactagggctgccacagcaatgtaccacaaaccgagtgacataaacacagaactttattttcgtatagtttcagatgttagaggtctgagaacaaggtgttatcagggttggtcccttctaaggcctctcttgttggcttgtagatggctgtctcctccttgtgtcttcacatggtctttcctctgagtgtgtttgtgtcctaatcttctcttcttataaagacactagtcatattggattagggcctccccatgacctaatttaaataaattaactatttaaagaccctccaaatacagtaaccttctgagatattgagatttaggacttccaacatatgaattttagaagggaacaatttagcccataacactgtgtccaattcttttaaaattaatgtttttgttgtaaatggactatataaataccttcgtatatatggcagaccacaggacttctgtccaagagaactgagttcaactccatctatg

SEQ ID NO: 26 - protein, 453 aa, Homo sapiens
MQGAQEASASEMLPLLLPLLWAGALAQERRFQLEGPESLTVQEGLCVLVPCRLPTTLPASYYGYGYWFLEGADVPVATNDPDEEVQEETRGRFHLLWDPRRKNCSLSIRDARRRDNAAYFFRLKSKWMKYGYTSSKLSVRVMALTHRPNISIPGTLESGHPSNLTCSVPWVCEQGTPPIFSWMSAAPTSLGPRTTQSSVLTITPRPQDHSTNLTCQVTFPGAGVTMERTIQLNVSYAPQKVAISIFQGNSAAFKILQNTSSLPVLEGQALRLLCDADGNPPAHLSWFQGFPALNATPISNTGVLELPQVGSAEEGDFTCRAQHPLGSLQISLSLFVHWKPEGRAGGVLGAVWGASITTLVFLCVCFIFRVKTRRKKAAQPVQNTDDVNPVMVSGSRGHQHQFQTGIVSDHPAEAGPISEDEQELHYAVLHFHKVQPQEPKVTDTEYSEIKIHK

SEQ ID NO: 27 - DNA, 1270 bp, Homo sapiens
agacgttcgcacacctgggtgccagcgccccagaggtcccgggacagcccgaggcgccgcgcccgccgccccgagctccccaagccttcgagagcggcgcacactcccggtctccactcgctcttccaacacccgctcgttttggcggcagctcgtgtcccagagaccgagttgccccagagaccgagacgccgccgctgcgaaggaccaatgagagccccgctgctaccgccggcgccggtggtgctgtcgctcttgatactcggctcaggccattatgctgctggattggacctcaatgacacctactctgggaagcgtgaaccattttctggggaccacagtgctgatggatttgaggttacctcaagaagtgagatgtcttcagggagtgagatttcccctgtgagtgaaatgccttctagtagtgaaccgtcctcgggagccgactatgactactcagaagagtatgataacgaaccacaaatacctggctatattgtcgatgattcagtcagagttgaacaggtagttaagcccccccaaaacaagacggaaagtgaaaatacttcagataaacccaaaagaaagaaaaagggaggcaaaaatggaaaaaatagaagaaacagaaagaagaaaaatccatgtaatgcagaatttcaaaatttctgcattcacggagaatgcaaatatatagagcacctggaagcagtaacatgcaaatgtcagcaagaatatttcggtgaacggtgtggggaaaagtccatgaaaactcacagcatgattgacagtagtttatcaaaaattgcattagcagccatagctgcctttatgtctgctgtgatcctcacagctgttgctgttattacagtccagcttagaagacaatacgtcaggaaatatgaaggagaagctgaggaacgaaagaaacttcgacaagagaatggaaatgtacatgctatagcataactgaagataaaattacaggatatcacattggagtcactgccaagtcatagccataaatgatgagtcggtcctctttccagtggatcataagacaatggaccctttttgttatgatggttttaaactttcaattgtcactttttatgctatttctgtatataaaggtgcacgaaggtaaaaagtattttttcaagttgtaaataatttatttaatatttaatggaagtgtatttattttacagctcattaaacttttttaaccaaacagaaaaaaaaaaaaaaaaaaaaaaaaaaaaaaaaa

SEQ ID NO: 28 - protein, 252 aa, Homo sapiens
MRAPLLPPAPVVLSLLILGSGHYAAGLDLNDTYSGKREPFSGDHSADGFEVTSRSEMSSGSEISPVSEMPSSSEPSSGADYDYSEEYDNEPQIPGYIVDDSVRVEQVVKPPQNKTESENTSDKPKRKKKGGKNGKNRRNRKKKNPCNAEFQNFCIHGECKYIEHLEAVTCKCQQEYFGERCGEKSMKTHSMIDSSLSKIALAAIAAFMSAVILTAVAVITVQLRRQYVRKYEGEAEERKKLRQENGNVHAIA

SEQ ID NO: 29 - DNA, 1851 bp, Homo sapiens
gtgcaggtgaggcacgtttagcctgagccggccacggactccacttcccctgctcttcccccagtggcaaatccgcgccacctcgcaaacccccaactcaggcacttgggccccttttgggccccctctcgctcctccctttaggcacctccctgggcccgcccacggtctccccccagtttgggactgcgtcataagtatcccagacctcggcttgcagtagtgttagactgaagataaagtaagtgctgtttgggctaacaggatctcctcttgcagtctgcagcccaggacgctgattccagcagcgccttaccgcgcagcccgaagattcactatggtgaaaatcgccttcaatacccctaccgccgtgcaaaaggaggaggcgcggcaagacgtggaggccctcctgagccgcacggtcagaactcagatactgaccggcaaggagctccgagttgccacccaggaaaaagagggctcctctgggagatgtatgcttactctcttaggcctttcattcatcttggcaggacttattgttggtggagcctgcatttacaagtacttcatgcccaagagcaccatttaccgtggagagatgtgcttttttgattctgaggatcctgcaaattcccttcgtggaggagagcctaacttcctgcctgtgactgaggaggctgacattcgtgaggatgacaacattgcaatcattgatgtgcctgtccccagtttctctgatagtgaccctgcagcaattattcatgactttgaaaagggaatgactgcttacctggacttgttgctggggaactgctatctgatgcccctcaatacttctattgttatgcctccaaaaaatctggtagagctctttggcaaactggcgagtggcagatatctgcctcaaacttatgtggttcgagaagacctagttgctgtggaggaaattcgtgatgttagtaaccttggcatctttatttaccaactttgcaataacagaaagtccttccgccttcgtcgcagagacctcttgctgggtttcaacaaacgtgccattgataaatgctggaagattagacacttccccaacgaatttattgttgagaccaagatctgtcaagagtaagaggcaacagatagagtgtccttggtaataagaagtcagagatttacaatatgactttaacattaaggtttatgggatactcaagatatttactcatgcatttactctattgcttatgctttaaaaaaaggaaaaaaaaaaactactaaccactgcaagctcttgtcaaattttagtttaattggcattgcttgttttttgaaactgaaattacatgagtttcattttttctttgaatttatagggtttagatttctgaaagcagcatgaatatatcacctaacatcctgacaataaattccatccgttgttttttttgtttgtttgttttttcttttcctttaagtaagctctttattcatcttatggtggagcaattttaaaatttgaaatattttaaattgtttttgaactttttgtgtaaaatatatcagatctcaacattgttggtttcttttgtttttcattttgtacaactttcttgaatttagaaattacatctttgcagttctgttaggtgctctgtaattaacctgacttatatgtgaacaattttcatgagacagtcatttttaactaatgcagtgattctttctcactactatctgtattgtggaatgcacaaaattgtgtaggtgctgaatgctgtaaggagtttaggttgtatgaattctacaaccctataataaattttactctatacaaaaaaaaaaaaaaaaaaa

SEQ ID NO: 30 - protein, 263 aa, Homo sapiens
MVKIAFNTPTAVQKEEARQDVEALLSRTVRTQILTGKELRVATQEKEGSSGRCMLTLLGLSFILAGLIVGGACIYKYFMPKSTIYRGEMCFFDSEDPANSLRGGEPNFLPVTEEADIREDDNIAIIDVPVPSFSDSDPAAIIHDFEKGMTAYLDLLLGNCYLMPLNTSIVMPPKNLVELFGKLASGRYLPQTYVVREDLVAVEEIRDVSNLGIFIYQLCNNRKSFRLRRRDLLLGFNKRAIDKCWKIRHFPNEFIVETKICQE

SEQ ID NO: 31 - DNA, 3219 bp, Homo sapiens
actgtaggcaccaccgggcgccgaatggctgttttctaactgggatcctcggtgacgtatggctgcctgccccttggcagctgtctttatggaccagtaggcagagcgaaattgacgctgacaagacttttgcatcttggaagggactgtaatctactgtagtgaagaacagagcctctcaatcagacgggtgtaaataagagacggaggggagtccaaaagaaaaggaagaggaggaaaaacaagtgtgtgttggggggaacagggggaaaagcatttttggtggatggtatgaagccagccatggaaactgcagccgaggaaaatactgaacaaagccaagagagaaaagtgaacagcagagctgaaatggaaattggcaggtaccactggatgtacccaggctcaaagaaccaccagtaccatcccgtgccaaccctgggggacagggctagccccttgagcagtccaggctgctttgaatgctgcatcaagtgtctgggaggagtcccctacgcctccctggtggccaccatcctctgcttctccggggtggccttattctgcggctgtgggcatgtggctctcgcaggcaccgtggcgattcttgagcaacacttctccaccaacgccagtgaccatgccttgctgagcgaggtgatacaactgatgcagtatgtcatctatggaattgcgtcctttttcttcttgtatgggatcattctgttggcagaaggcttttacaccacaagtgcagtgaaagaactgcacggtgagtttaaaacaaccgcttgtggccgatgcatcagtggaatgttcgttttcctcacctatgtgcttggagtggcctggctgggtgtgtttggtttctcagcggtgcccgtgtttatgttctacaacatatggtcaacttgtgaagtcatcaagtcaccgcagaccaacgggaccacgggtgtggagcagatctgtgtggatatccgacaatacggtatcattccttggaatgctttccccggaaaaatatgtggctctgccctggagaacatctgcaacacaaacgagttctacatgtcctatcacctgttcattgtggcctgtgcaggagctggtgccaccgtcattgccctgatccacttcctcatgatactgtcttctaactgggcttacttaaaggatgcgagcaaaatgcaggcttaccaggatatcaaagcaaaggaagaacaggaactgcaagatatccagtctcggtcaaaagaacaactcaattcttacacataaatgtttgccagagtgtttcggccgacgtatttacagctctgacaaatcatcagacagctgctctgcagtacagatgtgtatcccaccaaactaatgtagatgtacaaacacttcactgtctgtctcaagctgctgggatgtatctctaggaaaaccttccagtgggtaaatctttttctttagaacaaatattggaggtttcatgttagccattttaaaaggcaacactttgacaaaatgatcgttcatactttgggaatttgtggcatgttcacatttattgctagggcaattctaccaagacactcaatggaatatgtcacactccttaatagggacctgtgactccttaataaggacctgtgacatgcccagcatcaagggataagaccgtaaattcacatatatgccatctgtcctcaagtgttatctacataggaaataaaatggaattgatgtaaagttccatttctgacagctgacatttattaaactttggatcaaagataatgtgattcttatgattgatttctcaaactagcttttccctcccaagtccaggacccattaatttcctgagccaatcagaaatatatttttcaataatgctaaaattagctacaattctgctgaccctactattaaagaatctggatgctggactcactgacaagctttccagaagcaattttataacagatttcattttaacaaaatactgatccaattttcattattcttgagaaatgtcagctttgccttaatgagtatttgctttaaatttctaagaatttatatcataactagagacccaaatatctttcacagaattttgttccataaatgtttttcttaattattaagaagtgttaccttattaaaatgaccaccattctaaaccatttttcagtggtctggatacgaagtttacagtttcataccaactatctaaaacctaattgcaaattgaccacagacctctaacctcctacttttatagacttgaatacttaagtaatttaaattagggttggtatttcatttttttcttatctaaatcttagtttcctggaataataaagtttgatgttcagcaagagaactgcttgagtttaagccattttcaaaagaaacttgccttttacattattgtgttccagaacattaagtgactgtaggtactgggtattagtgatggtaaactttgtgttgctctttatgaaatgatccatataactgttgggtgcatcagtgcttttcaaaggggctgcttactatagggttaactatgtatattcattgttaagagttaacttgtggtttggctgtttcctggattttataacatacatgtgcagaaatgtattcaaatgaaaggaagcatacctttatcaagatgctattaaaattgaacatcaagtataatatttcatttggattctcttttttggttaatgcctaaaaatgcctatttgggatttttttttttttttaaattaagagaagctctcttctgtgtagaacagttgttccaaaatagcttagtgttttgttttcctgttgcatgacagatttaactattctttccagcagtggaggtgctgtcagagtccagtgttctagaagaggcagtgtctaaagcctaattttacttttctaattctggtagctattaccaggaatttttgaaagttttgtttaagtagtctaatattttttatgtaaagagcattaaattttgctatgtataaatttttgtaacctaacagtgaatcaatattttctatcagtgccaagggcttcctgtagttctattcaagtgttacaataaatatttgtagataatagtcaatacttgtgtatgcttattttaaagatctatttaggtggaaatagttgtggatgtactaagagtaatgaaataaaattatagcttcaaaa

SEQ ID NO: 32 - protein, 328 aa, Homo sapiens
MKPAMETAAEENTEQSQERKVNSRAEMEIGRYHWMYPGSKNHQYHPVPTLGDRASPLSSPGCFECCIKCLGGVPYASLVATILCFSGVALFCGCGHVALAGTVAILEQHFSTNASDHALLSEVIQLMQYVIYGIASFFFLYGIILLAEGFYTTSAVKELHGEFKTTACGRCISGMFVFLTYVLGVAWLGVFGFSAVPVFMFYNIWSTCEVIKSPQTNGTTGVEQICVDIRQYGIIPWNAFPGKICGSALENICNTNEFYMSYHLFIVACAGAGATVIALIHFLMILSSNWAYLKDASKMQAYQDIKAKEEQELQDIQSRSKEQLNSYT

SEQ ID NO: 33 - DNA, 1789 bp, Homo sapiens
caggtcctgggagaggacagaaaacaactgggactcctcagcccccggcagctcccagtgcccagccacccacaacacaacccaaagccttctagacaagctcagtggaatctgaagggcccaccccatggaggaatgctgggtgacagagatagccaatggctccaaggatggcttggattccaaccctatgaaggattacatgatcctgagtggtccccagaagacagctgttgctgtgttgtgcactcttctgggcctgctaagtgccctggagaacgtggctgtgctctatctgatcctgtcctcccaccaactccgccggaagccctcatacctgttcattggcagcttggctggggctgacttcctggccagtgtggtctttgcatgcagctttgtgaatttccatgttttccatggtgtggattccaaggctgtcttcctgctgaagattggcagcgtgactatgaccttcacagcctctgtgggtagcctcctgctgaccgccattgaccgatacctctgcctgcgctatccaccttcctacaaagctctgctcacccgtggaagggcactggtgaccctgggcatcatgtgggtcctctcagcactagtctcctacctgcccctcatgggatggacttgctgtcccaggccctgctctgagcttttcccactgatccccaatgactacctgctgagctggctcctgttcatcgccttcctcttttccggaatcatctacacctatgggcatgttctctggaaggcccatcagcatgtggccagcttgtctggccaccaggacaggcaggtgccaggaatggcccgaatgaggctggatgtgaggttggccaagaccctagggctagtgttggctgtgctcctcatctgttggttcccagtgctggccctcatggcccacagcctggccactacgctcagtgaccaggtcaagaaggcctttgctttctgctccatgctgtgcctcatcaactccatggtcaaccctgtcatctatgctctacggagtggagagatccgctcctctgcccatcactgcctggctcactggaagaagtgtgtgaggggccttgggtcagaggcaaaagaagaagccccgagatcctcagtcaccgagacagaggctgatgggaaaatcactccgtggccagattccagagatctagacctctctgattgctgatgaggcctcttcccaatttaaacaactcaagtcagaaatcagttcactccctggaagagagagaggggtcttggcactctcttcttacttaaaccagtcccagacacctagacacggacccctttttgctgatgagtgttgggactgactcctggaagacagcctggccttgcccacctgcacacagtctgttggataggtagggccacgaggagtagccaggtaggcgagacacaaaaggcctgggacagggtcagtacaagtcaggtcaggcttcatgcctgcatcctccagagaccacaggagccaaagcgagcctccaggcccagcaatgagggacttgggagaaatctgagaagaatgggttgttctcttgggaagtcagggtatcagatgggatggacatccaggtcttctctctgcctaattgtcaaggcctccttggctctggagctatgaaaggccccactttcaagtcacccttgccactgaggaccgaggactatgctatgatgaggattaaggtgttgacttgcctctttcagagataaatgacaagccttcaaaaaaaaaaaaaaa

SEQ ID NO: 34 - protein, 360 aa, Homo sapiens
MEECWVTEIANGSKDGLDSNPMKDYMILSGPQKTAVAVLCTLLGLLSALENVAVLYLILSSHQLRRKPSYLFIGSLAGADFLASVVFACSFVNFHVFHGVDSKAVFLLKIGSVTMTFTASVGSLLLTAIDRYLCLRYPPSYKALLTRGRALVTLGIMWVLSALVSYLPLMGWTCCPRPCSELFPLIPNDYLLSWLLFIAFLFSGIIYTYGHVLWKAHQHVASLSGHQDRQVPGMARMRLDVRLAKTLGLVLAVLLICWFPVLALMAHSLATTLSDQVKKAFAFCSMLCLINSMVNPVIYALRSGEIRSSAHHCLAHWKKCVRGLGSEAKEEAPRSSVTETEADGKITPWPDSRDLDLSDC

SEQ ID NO: 35 - DNA, 1165 bp, Homo sapiens
gctgggagtagagggcagagctcccaccccgccccgcccccagggggcgccccgggcccggcgcgagaggaggcagagggggcgtcaggccgcgggagaggaggccatgggcgcgcgcggggcgctgctgctggcgctgctgctggctcgggctggactcaggaagccggagtcgcaggaggcggcgccgttatcaggaccatgcggccgacgggtcatcacgtcgcgcatcgtgggtggagaggacgccgaactcgggcgttggccgtggcaggggagcctgcgcctgtgggattcccacgtatgcggagtgagcctgctcagccaccgctgggcactcacggcggcgcactgctttgaaacctatagtgaccttagtgatccctccgggtggatggtccagtttggccagctgacttccatgccatccttctggagcctgcaggcctactacacccgttacttcgtatcgaatatctatctgagccctcgctacctggggaattcaccctatgacattgccttggtgaagctgtctgcacctgtcacctacactaaacacatccagcccatctgtctccaggcctccacatttgagtttgagaaccggacagactgctgggtgactggctgggggtacatcaaagaggatgaggcactgccatctccccacaccctccaggaagttcaggtcgccatcataaacaactctatgtgcaaccacctcttcctcaagtacagtttccgcaaggacatctttggagacatggtttgtgctggcaatgcccaaggcgggaaggatgcctgcttcggtgactcaggtggacccttggcctgtaacaagaatggactgtggtatcagattggagtcgtgagctggggagtgggctgtggtcggcccaatcggcccggtgtctacaccaatatcagccaccactttgagtggatccagaagctgatggcccagagtggcatgtcccagccagacccctcctggccgctactctttttccctcttctctgggctctcccactcctggggccggtctgagcctacctgagcccatgcagcctggggccactgccaagtcaggccctggttctcttctgtcttgtttggtaataaacacattccagttgatgccttgcagggcattcttcaaaa

SEQ ID NO: 36 - protein, 314 aa, Homo sapiens
MGARGALLLALLLARAGLRKPESQEAAPLSGPCGRRVITSRIVGGEDAELGRWPWQGSLRLWDSHVCGVSLLSHRWALTAAHCFETYSDLSDPSGWMVQFGQLTSMPSFWSLQAYYTRYFVSNIYLSPRYLGNSPYDIALVKLSAPVTYTKHIQPICLQASTFEFENRTDCWVTGWGYIKEDEALPSPHTLQEVQVAIINNSMCNHLFLKYSFRKDIFGDMVCAGNAQGGKDACFGDSGGPLACNKNGLWYQIGVVSWGVGCGRPNRPGVYTNISHHFEWIQKLMAQSGMSQPDPSWPLLFFPLLWALPLLGPV

SEQ ID NO: 37 - DNA, 2195 bp, Homo sapiens
acactgcagccatataaatcagatttttgacatgttataaaatgcaagtcacagctgctgttgtctgcggtattcaaaaacttttgaaacactgcatgtccaacaaaatttattttttgtgtgaatgtactgtttttcaaccctactctcttgaccaagaatgaaactatttacaaattaagatgccaacagatcacgaagagccctgtggtcccagtcacaagtcgttttgcctgaatggggggctttgttatgtgatacctactattcccagcccattttgtaggtgcgttgaaaactatacaggagctcgttgtgaagaggtttttctcccaggctccagcatccaaactaaaagtaacctgtttgaagcttttgtggcattggcggtcctagtaacacttatcattggagccttctacttcctttgcaggaaaggccactttcagagagccagttcagtccagtatgatatcaacctggtagagacgagcagtaccagtgcccaccacagtcatgaacaacactgaagaaacgtcaaagtgaaccaaatcattgtttttattttacaaaggcagaaaatgaaacaccactaggtaaaagaattaaaaatctaatcctttatttcttaaataaaacgcttgtgtaactcgtatcatgaaccataatccattctgctgcaaggtgtgtgtgcttctgtaatgtgcatcagtccatcggcaactgctaagtagggggtgataccagtataattcgaagtcacattggttcaacatgactctccccagaaagctgatgtgctgaagcaaccagaggcaaatgttcacacacctagagagaaaccctaagggatatatgaagatcttatgaaaaaggatgaaaaccctttaaatgcaaggagtagctggcttagtggcttcaaaaccacctcattcctgctgttatctgagaagctgcaagtactgatgaaaaaactgagaagacatttcacctggcaattagaaaaaagcgctgactgatagatacctctgtatcattctttcaatattgatgaaaatgctttctactagaagtgactgatttcaaggatctgtctctcaaaggaagaaacaaaaacccaaaattttgactgcaaaagattgactaattctaggtgcaagtaactggaaatttaggattgttattgtactacacaggtcacaaagttccaaacctatttcccttgtaatttttagtgcatgatttttcagaatgcagtttctatctttttaggtgcaatattaagaactgattaggtcagaacaatttagtttctccagttttttctacctaagttacatgggggaaaaaaaagcaatagtaactttaaggaagtatgaaaataaagtcttggagcagtggaaaggtctggggctggtaaatggcttaggcagaagggcatgcaccggccaaacctaacagcctgtctctgaactatgtcctcgtcaaggctgggatgcacgctggcttctctacacagtctggcccagtgtaagtgctgtgaattcagtgggtcactagtgtcaccaattcattcatcacccatcattcactcatttcacaaacacatgagggtaagacattgagacagagtacacaaaatgaaaagctctcacataattttaatagactttattagaagttttagattttcagaaaaactgagcagatagtatagagttcccctatgcttccccccaccccaggcctttattattaacatcttgcactagtgtggtatatttgtttaaccaatattgacacatttttactttactttttgagacaaagtctcactctgtcatccaggctagctgaagcctgtaatttacatgaagggtcctctttttgttgtatgtctttatggattttgaccaatatataatgtcatgtatccactattatagtattgtatacagtagtttcaccaccctaaaaatctctactccatgtatttacccctccctctctcccactgaacctctggcaaccagtctttactaactttgctttctccagaatgtcatatatttgaaatcatgtagtatgtagcctttcagactaacttctttcacttagcaatatacacttaaagttcctctatgtcttgtgactaaataccccaccccctgccctttttaaaaaaaaaaaaaaaa

SEQ ID NO: 38 - protein, 115 aa, Homo sapiens
MPTDHEEPCGPSHKSFCLNGGLCYVIPTIPSPFCRCVENYTGARCEEVFLPGSSIQTKSNLFEAFVALAVLVTLIIGAFYFLCRKGHFQRASSVQYDINLVETSSTSAHHSHEQH

SEQ ID NO: 39 - DNA, 847 bp, Homo sapiens
cgtcagtctagaaggataagagaaagaaagttaagcaactacaggaaatggctttgggagttccaatatcagtctatcttttattcaacgcaatgacagcactgaccgaagaggcagccgtgactgtaacacctccaatcacagcccagcaagctgacaacatagaaggacccatagccttgaagttctcacacctttgcctggaagatcataacagttactgcatcaacggtgcttgtgcattccaccatgagctagagaaagccatctgcaggtgttttactggttatactggagaaaggtgtgagcacttgactttaacttcatatgctgtggattcttatgaaaaatacattgcaattgggattggtgttggattactattaagtggttttcttgttattttttactgctatataagaaagaggtatgaaaaagacaaaatatgaagtcacttcatatgcaatcgtttgacaaatagttattcaggccctataatgtgtcaggcactgacatgtaaaatttttttaattaaaaaagagctgtaatctggcaaaaagtttctatgtaatatttttcatgccttttctcataaacccagacgagtggtaaaaatttgccttcagttgtaataggagagttcaaacgtacagtctcccttcaacctatctctgtctgcccatatcaaaattataaatgaggaggacagcaggccccaagaaagtagggactaagtatgtcttgttcaaaattgtatattcagtgacttacactatgcctagcacacaacacacactgagtaaatatttgttgagtgaaataaaatcaagaaacaagtaaaaactga

SEQ ID NO: 40 - protein, 133 aa, Homo sapiens
MALGVPISVYLLFNAMTALTEEAAVTVTPPITAQQADNIEGPIALKFSHLCLEDHNSYCINGACAFHHELEKAICRCFTGYTGERCEHLTLTSYAVDSYEKYIAIGIGVGLLLSGFLVIFYCYIRKRYEKDKI

SEQ ID NO: 41 - DNA, 4868 bp, Homo sapiens
ggccgagccgtccgctttaaggccctcccctcccgcacccggccccaggaacccggggcgccccggatcgggaacgtgcgtgatgacgcacgtgcgcgcgaagacgtggggacgcaggcgggtcgtagagagcgttcagccgtctgtatatctccccagatacctgaaactgaccacctgagtacgttttcccattgctgagctgtttccctgatatctggccatgcaacggagatcaagagggataaatactggacttattctactcctttctcaaatcttccatgttgggatcaacaatattccacctgtcaccctagcaactttggccctcaacatctggttcttcttgaaccctcagaagccactgtatagctcctgccttagtgtggagaagtgttaccagcaaaaagactggcagcgtttactgctctctccccttcaccatgctgatgattggcatttgtatttcaatatggcatccatgctctggaaaggaataaatctagaaagaagactgggaagtagatggtttgcctatgttatcaccgcattttctgtacttactggagtggtatacctgctcttgcaatttgctgttgccgaatttatggatgaacctgacttcaaaaggagctgtgctgtaggtttctcaggagttttgtttgctttgaaagttcttaacaaccattattgccctggaggctttgtcaacattttgggctttcctgtaccgaacagatttgcttgttgggtcgaacttgtggctattcatttattctcaccagggacttccttcgctgggcatctggctgggattcttgttggactaatgtacactcaagggcctctgaagaaaatcatggaagcatgtgcaggcggtttttcctccagtgttggttacccaggacggcaatactactttaatagttcaggcagctctggatatcaggattattatccgcatggcaggccagatcactatgaagaagcacccaggaactatgacacgtacacagcaggactgagtgaagaagaacagctcgagagagcattacaagccagcctctgggaccgaggaaataccagaaatagcccaccaccctacgggtttcatctctcaccagaagaaatgaggagacagcggcttcacagattcgatagccagtgaggtggcatcttgggaagacatggcctattcgtgtaattattgcccatttggctcattccccaagcccctaattcattttaattcattttaaacaaaagcagagtacaccggtattgctccagatcgctcacatcacctgggacagtcccatggcccctatgagtcaactcacagcttgcggggagtgggccttctcctggccttgttcttgctcataaacaggtcacttcctccatgaagagaccagtttccacgctcccatctctcactgctgactcagcgatgcctctgcctcggtctgcttttgaagactgtgaccttcaccaggaggttttacttacaccagtcgggaagattagtccctcattctgcctggagtgccccgtgtttgacttggcagcgggtgtggagccatccccgcgtcctcctggcgcattgccactgtggctgtccaggaacaggatgtggctgccttggccgaatgttgtcctactctccccaaccccggcgcctcagctcctcagctcctcgggcccctgcgtctggctggtgtttgcagggctttcgctctgctctggtattgctctgcctttatagaaagtcttattgaagaagtgtaagaaagacctaaggtggggaagactcctacacacaccattagtatcagtgacaccagcaatgtaggttcccagccccttcccagtggcagcttgtgtgtccaggagataggacatcatttaacgcatcagcaaagtagcagcagatgccacatacagagtagagcgaaggcatttggtggatcggtcactagagatctatcttgcagaaagtatgtttttcctcataaaagtgcctcttaattggccattgtaccagccacttgtcctagccaaatgtccaaaacacgcccttgggccccgccacgttacaatccacagattgtctgtctgagtcgtttaaggcatttcctggtgcttgtgttccatgaataaaaggacaaagtcagaagatcactgatgtcttactgtcaacagagatattttaaaagagagaagcaggaaaagatcttccttttttgatctacaacttatatagttttctgattatgcacataatagatatgccttccagatgcataaggcaaacatctggaaagaaatatacccaaatcttagcaggggttatctttgggagtggagtacatgggattttgctttcttcatttttataattttatattactgtcttggaagatgtgtttatgtgtgtgtgttacttttacaatcaggaaaacatatttaataacatatagtcaagaaaacagacttaaaaataaatactatgtgtccattgagaaaattcacaatataaacagaaatacaaataaatacatacacaattttaaagtcacctgtagccctacccttagaggtacccagggttaacattttggtggtattgtcttatcaatttttccgttgatacattcagcaaatttggagcacattgaccatggagttttgtgtccaaatccaatctgaatttacctggaagaggccttgacacctgcatggaaatgagctaagaaaaccactggagccttgggagctctttggcctcctggctggcccagtaatatctgagctcctttggttaatttataactgatataaaactacatcttctttataatataaattgtacctgtgagtctagaagctttaaatgtgtttaaattaaaatattcaagctaaatgttactgctctctcccaaattctgtaagtttgactcccgttaccccaattagaagtaacttctttgtttcatgccacttttatagcatttggtaattctgctataacacatcttgcccctattattaactgtgcacagctacacaaaggtgtgccttctacgtgggaacatggattgtgaatgactctgtaatgaggcctgagtcttagttatctttccactcactccccgtctcccctttccaaccccaaaggctcacgataggggctcactaaatgtcagtgtttcaccaaagtattttttccattgtattaagagtccagtcactgtatatggaagtattttattttttatttttttatatcacttgagtccactagtagtacttccttgctctgtttgacttgtcagatacaaagacacgggattagattttgggtggtaaaattgtgatacgcatggctgttgatggagtggaacatcttagtgatgtgagaaaggtcattttagttataaatgtaaaccaattactttagcacaacaataaagatgttctggaaattattataattattttagttaatggacttgcctgtaacaagtgcttatgtttggaatgtccattttattttattttcctctacaataaggaatccctaaagttatgccaacaaactggaattggattgagaaagacaaaagcaagtgagcaagtgtattagactaattatctctagtagggaataagcacttagagctaattttttaatttggtttatttattagtagctccctgattgtctgttaagcccctggttcccacagtttggtgtggtcagtcaacttaagcgaccttttaatgcagaatctttacttggttctgaagaggaggcagtagttaaaattgcttcctcttaatgactctgaatgtattgcctgtgattccaaagttgtacataattgttcagacctcctccatccttttaaattgcctgctgcagtaaataactagtttgagtagaactagatcctgtctatctatttggcacatgttctgctgcctggggagtaagcaagctaaagggatgagaaagaccacctccccctaccctggaaattgcactgcaaggcagggcgagaatggggtagctggcagacctggcctccttgttcccagtcttagtttttcttgagagattcagtattcagtaaagaatagcattcaattagtcaaaaaatatatatataacttcttcctttcccttcccatgaatcattgcagtcattccctaagtttcttctctttttttttcatggctgctagtattttattttagaatcacagactctcagcttagagagtcacagtatctcaattatttgctctgttcaatacttaacaatacctcctcactcaattctacataactccagcttagtcttccaaaattcactttcatgatgccactcagcatctcaaatacctttcattggctctctgctgccaaaggataaaggtcaaagtcattagcctcaacagtgggcttcaaccagcctttggacctcagccccatttatccatcacagaggctggtaactagtctcactgctcaggctgtgagtgttcctgatcttgtgacattctgtgctgtgcttttacatggaacagctctttcctctctcttggcccattcagatcctcctcatccagcccccatctgaatcctgtaacagacacaaccacatctacacagtttccacataccacttggaattgctggttatgctgcaatgagagaatgtctttgtctttaaattgtaagcttcatgagggcagggaccatctgtttctctgtctctcctcacagtgccttgagcagtacgttgtctggaatgtcagaaccaataaatacttgtggattgaaacaaaaaaaaaaaaaa

SEQ ID NO: 42 - protein, 315 aa, Homo sapiens
MQRRSRGINTGLILLLSQIFHVGINNIPPVTLATLALNIWFFLNPQKPLYSSCLSVEKCYQQKDWQRLLLSPLHHADDWHLYFNMASMLWKGINLERRLGSRWFAYVITAFSVLTGVVYLLLQFAVAEFMDEPDFKRSCAVGFSGVLFALKVLNNHYCPGGFVNILGFPVPNRFACWVELVAIHLFSPGTSFAGHLAGILVGLMYTQGPLKKIMEACAGGFSSSVGYPGRQYYFNSSGSSGYQDYYPHGRPDHYEEAPRNYDTYTAGLSEEEQLERALQASLWDRGNTRNSPPPYGFHLSPEEMRRQRLHRFDSQ

SEQ ID NO: 43 - DNA, 5843 bp, Homo sapiens
gagcggacaggcgtggcggccggagccccagcatccctgcttgaggtccaggagcggagcccgcggccaccgccgcctgatcagcgcgaccccggcccgcgcccgccccgcccggcaagatgctgcccgtgtaccaggaggtgaagcccaacccgctgcaggacgcgaacctctgctcacgcgtgttcttctggtggctcaatcccttgtttaaaattggccataaacggagattagaggaagatgatatgtattcagtgctgccagaagaccgctcacagcaccttggagaggagttgcaagggttctgggataaagaagttttaagagctgagaatgacgcacagaagccttctttaacaagagcaatcataaagtgttactggaaatcttatttagttttgggaatttttacgttaattgaggaaagtgccaaagtaatccagcccatatttttgggaaaaattattaattattttgaaaattatgatcccatggattctgtggctttgaacacagcgtacgcctatgccacggtgctgactttttgcacgctcattttggctatactgcatcacttatatttttatcacgttcagtgtgctgggatgaggttacgagtagccatgtgccatatgatttatcggaaggcacttcgtcttagtaacatggccatggggaagacaaccacaggccagatagtcaatctgctgtccaatgatgtgaacaagtttgatcaggtgacagtgttcttacacttcctgtgggcaggaccactgcaggcgattgcagtgactgccctactctggatggagataggaatatcgtgccttgctgggatggcagttctaatcattctcctgcccttgcaaagctgttttgggaagttgttctcatcactgaggagtaaaactgcaactttcacggatgccaggatcaggaccatgaatgaagttataactggtataaggataataaaaatgtacgcctgggaaaagtcattttcaaatcttattaccaatttgagaaagaaggagatttccaagattctgagaagttcctgcctcagagggatgaatttggcttcatttttcagtgcaagcaaaatcatcgtgtttgtgaccttcaccacctacgtgctcctcggcagtgtgatcacagccagccgcgtgttcgtggcagtgacgctgtatggggctgtgcggctgacggttaccctcttcttcccctcagccattgagagggtgtcagaggcaatcgtcagcatccgaagaatccagacctttttgctacttgatgagatatcacagcgcaaccgtcagctgccgtcagatggtaaaaagatggtgcatgtgcaggattttactgctttttgggataaggcatcagagaccccaactctacaaggcctttcctttactgtcagacctggcgaattgttagctgtggtcggccccgtgggagcagggaagtcatcactgttaagtgccgtgctcggggaattggccccaagtcacgggctggtcagcgtgcatggaagaattgcctatgtgtctcagcagccctgggtgttctcgggaactctgaggagtaatattttatttgggaagaaatacgaaaaggaacgatatgaaaaagtcataaaggcttgtgctctgaaaaaggatttacagctgttggaggatggtgatctgactgtgataggagatcggggaaccacgctgagtggagggcagaaagcacgggtaaaccttgcaagagcagtgtatcaagatgctgacatctatctcctggacgatcctctcagtgcagtagatgcggaagttagcagacacttgttcgaactgtgtatttgtcaaattttgcatgagaagatcacaattttagtgactcatcagttgcagtacctcaaagctgcaagtcagattctgatattgaaagatggtaaaatggtgcagaaggggacttacactgagttcctaaaatctggtatagattttggctcccttttaaagaaggataatgaggaaagtgaacaacctccagttccaggaactcccacactaaggaatcgtaccttctcagagtcttcggtttggtctcaacaatcttctagaccctccttgaaagatggtgctctggagagccaagatacagagaatgtcccagttacactatcagaggagaaccgttctgaaggaaaagttggttttcaggcctataagaattacttcagagctggtgctcactggattgtcttcattttccttattctcctaaacactgcagctcaggttgcctatgtgcttcaagattggtggctttcatactgggcaaacaaacaaagtatgctaaatgtcactgtaaatggaggaggaaatgtaaccgagaagctagatcttaactggtacttaggaatttattcaggtttaactgtagctaccgttctttttggcatagcaagatctctattggtattctacgtccttgttaactcttcacaaactttgcacaacaaaatgtttgagtcaattctgaaagctccggtattattctttgatagaaatccaataggaagaattttaaatcgtttctccaaagacattggacacttggatgatttgctgccgctgacgtttttagatttcatccagacattgctacaagtggttggtgtggtctctgtggctgtggccgtgattccttggatcgcaatacccttggttccccttggaatcattttcatttttcttcggcgatattttttggaaacgtcaagagatgtgaagcgcctggaatctacaactcggagtccagtgttttcccacttatcatcttctctccaggggctctggaccatccgggcatacaaagcagaagagaggtgtcaggaactgtttgatgcacaccaggatttacattcagaggcttggttcttgtttttgacaacgtcccgctggtttgccgtccgtctggatgccatctgtgccatgtttgtcatcatcgttgcctttgggtccctgattctggcaaaaactctggatgccgggcaggttggtttggcactgtcctatgccctcacgctcatggggatgtttcagtggtgtgttcgacaaagtgctgaagttgagaatatgatgatctcagtagaaagggtcattgaatacacagaccttgaaaaagaagcaccttgggaatatcagaaacgcccaccaccagcctggccccatgaaggagtgataatctttgacaatgtgaacttcatgtacagtccaggtgggcctctggtactgaagcatctgacagcactcattaaatcacaagaaaaggttggcattgtgggaagaaccggagctggaaaaagttccctcatctcagccctttttagattgtcagaacccgaaggtaaaatttggattgataagatcttgacaactgaaattggacttcacgatttaaggaagaagatgtcaatcatacctcaggaacctgttttgttcactggaacaatgaggaaaaacctggatccctttaatgagcacacggatgaggaactgtggaatgccttacaagaggtacaacttaaagaaaccattgaagatcttcctggtaaaatggatactgaattagcagaatcaggatccaattttagtgttggacaaagacaactggtgtgccttgccagggcaattctcaggaaaaatcagatattgattattgatgaagcgacggcaaatgtggatccaagaactgatgagttaatacaaaaaaaaatccgggagaaatttgcccactgcaccgtgctaaccattgcacacagattgaacaccattattgacagcgacaagataatggttttagattcaggaagactgaaagaatatgatgagccgtatgttttgctgcaaaataaagagagcctattttacaagatggtgcaacaactgggcaaggcagaagccgctgccctcactgaaacagcaaaacaggtatacttcaaaagaaattatccacatattggtcacactgaccacatggttacaaacacttccaatggacagccctcgaccttaactattttcgagacagcactgtgaatccaaccaaaatgtcaagtccgttccgaaggcattttccactagtttttggactatgtaaaccacattgtacttttttttactttggcaacaaatatttatacatacaagatgctagttcatttgaatatttctcccaacttatccaaggatctccagctctaacaaaatggtttatttttatttaaatgtcaatagttgttttttaaaatccaaatcagaggtgcaggccaccagttaaatgccgtctatcaggttttgtgccttaagagactacagagtcaaagctcatttttaaaggagtaggacaaagttgtcacaggtttttgttgttgtttttattgcccccaaaattacatgttaatttccatttatatcagggattctatttacttgaagactgtgaagttgccattttgtctcattgttttctttgacataactaggatccattatttcccctgaaggcttcttgttagaaaatagtacagttacaaccaataggaacaacaaaaagaaaaagtttgtgacattgtagtagggagtgtgtaccccttactccccatcaaaaaaaaaaatggatacatggttaaaggatagaagggcaatattttatcatatgttctaaaagagaaggaagagaaaatactactttctcaaaatggaagcccttaaaggtgctttgatactgaaggacacaaatgtgaccgtccatcctcctttagagttgcatgacttggacacggtaactgttgcagttttagactcagcattgtgacacttcccaagaaggccaaacctctaaccgacattcctgaaatacgtggcattattcttttttggatttctcatttatggaaggctaaccctctgttgactgtaagccttttggtttgggctgtattgaaatcctttctaaattgcatgaataggctctgctaacgtgatgagacaaactgaaaattattgcaagcattgactataattatgcagtacgttctcaggatgcatccaggggttcattttcatgagcctgtccaggttagtttactcctgaccactaatagcattgtcatttgggctttctgttgaatgaatcaacaaaccacaatacttcctgggaccttttgtactttatttgaactatgagtctttaatttttcctgatgatggtggctgtaatatgttgagttcagtttactaaaggttttactattatggtttgaagtggagtctcatgacctctcagaataaggtgtcacctccctgaaattgcatatatgtatatagacatgcacacgtgtgcatttgtttgtatacatatatttgtccttcgtatagcaagttttttgctcatcagcagagagcaacagatgttttattgagtgaagccttaaaaagcacacaccacacacagctaactgccaaaatacattgaccgtagtagctgttcaactcctagtacttagaaatacacgtatggttaatgttcagtccaacaaaccacacacagtaaatgtttattaatagtcatggttcgtattttaggtgactgaaattgcatcagtgatcataatgaggtttgttaaaacgatagctatattcaaaatgtctatatgtttatttggacttttgaggttaaagacagtcatataaacgtcctgtttctgttttaatgttatcatagaattttttaatgaaactaaattcaattgaaataaatgatagttttcatctccattcaga

SEQ ID NO: 44 - protein, 1325 aa, Homo sapiens
MLPVYQEVKPNPLQDANLCSRVFFWWLNPLFKIGHKRRLEEDDMYSVLPEDRSQHLGEELQGFWDKEVLRAENDAQKPSLTRAIIKCYWKSYLVLGIFTLIEESAKVIQPIFLGKIINYFENYDPMDSVALNTAYAYATVLTFCTLILAILHHLYFYHVQCAGMRLRVAMCHMIYRKALRLSNMAMGKTTTGQIVNLLSNDVNKFDQVTVFLHFLWAGPLQAIAVTALLWMEIGISCLAGMAVLIILLPLQSCFGKLFSSLRSKTATFTDARIRTMNEVITGIRIIKMYAWEKSFSNLITNLRKKEISKILRSSCLRGMNLASFFSASKIIVFVTFTTYVLLGSVITASRVFVAVTLYGAVRLTVTLFFPSAIERVSEAIVSIRRIQTFLLLDEISQRNRQLPSDGKKMVHVQDFTAFWDKASETPTLQGLSFTVRPGELLAVVGPVGAGKSSLLSAVLGELAPSHGLVSVHGRIAYVSQQPWVFSGTLRSNILFGKKYEKERYEKVIKACALKKDLQLLEDGDLTVIGDRGTTLSGGQKARVNLARAVYQDADIYLLDDPLSAVDAEVSRHLFELCICQILHEKITILVTHQLQYLKAASQILILKDGKMVQKGTYTEFLKSGIDFGSLLKKDNEESEQPPVPGTPTLRNRTFSESSVWSQQSSRPSLKDGALESQDTENVPVTLSEENRSEGKVGFQAYKNYFRAGAHWIVFIFLILLNTAAQVAYVLQDWWLSYWANKQSMLNVTVNGGGNVTEKLDLNWYLGIYSGLTVATVLFGIARSLLVFYVLVNSSQTLHNKMFESILKAPVLFFDRNPIGRILNRFSKDIGHLDDLLPLTFLDFIQTLLQVVGVVSVAVAVIPWIAIPLVPLGIIFIFLRRYFLETSRDVKRLESTTRSPVFSHLSSSLQGLWTIRAYKAEERCQELFDAHQDLHSEAWFLFLTTSRWFAVRLDAICAMFVIIVAFGSLILAKTLDAGQVGLALSYALTLMGMFQWCVRQSAEVENMMISVERVIEYTDLEKEAPWEYQKRPPPAWPHEGVIIFDNVNFMYSPGGPLVLKHLTALIKSQEKVGIVGRTGAGKSSLISALFRLSEPEGKIWIDKILTTEIGLHDLRKKMSIIPQEPVLFTGTMRKNLDPFNEHTDEELWNALQEVQLKETIEDLPGKMDTELAESGSNFSVGQRQLVCLARAILRKNQILIIDEATANVDPRTDELIQKKIREKFAHCTVLTIAHRLNTIIDSDKIMVLDSGRLKEYDEPYVLLQNKESLFYKMVQQLGKAEAAALTETAKQVYFKRNYPHIGHTDHMVTNTSNGQPSTLTIFETAL

SEQ ID NO: 45 - DNA, 10973 bp, Homo sapiens
cccggagcggcgcgggcggcctggagccccgggagcggcgcgcgcggtcccggcccagcggctctcctggcctcgcgctgcacattctctcctggcggcggcgccacctgcagtagcgttcgcccgaacatggcgacacggagcagcaggagggagtcgcgactcccgttcctattcaccctggtcgcactgctgccgcccggagctctctgcgaagtctggacgcagaggctgcacggcggcagcgcgcccttgccccaggaccggggcttcctcgtggtgcagggcgacccgcgcgagctgcggctgtgggcgcgcggggatgccaggggggcgagccgcgcggacgagaagccgctccggaggaaacggagcgctgccctgcagcccgagcccatcaaggtgtacggacaggttagtctgaatgattcccacaatcagatggtggtgcactgggctggagagaaaagcaacgtgatcgtggccttggcccgagatagcctggcattggcgaggcccaagagcagtgatgtgtacgtgtcttacgactatggaaaatcattcaagaaaatttcagacaagttaaactttggcttgggaaataggagtgaagctgttatcgcccagttctaccacagccctgcggacaacaagcggtacatctttgcagacgcttatgcccagtacctctggatcacgtttgacttctgcaacactcttcaaggcttttccatcccatttcgggcagctgatctcctcctacacagtaaggcctccaaccttctcttgggctttgacaggtcccaccccaacaagcagctgtggaagtcagatgactttggccagacctggatcatgattcaggaacatgtcaagtccttttcttggggaattgatccctatgacaaaccaaataccatctacattgaacgacatgaaccctctggctactccactgtcttccgaagtacagatttcttccagtcccgggaaaaccaggaagtgatccttgaggaagtgagagattttcagcttcgggacaagtacatgtttgctacaaaggtggtgcatctcttgggcagtgaacagcagtcttctgtccagctctgggtctcctttggccggaagcccatgagagcagcccagtttgtcacaagacatcctattaatgaatattacatcgcagatgcctccgaggaccaggtgtttgtgtgtgtcagccacagtaacaaccgcaccaatttatacatctcagaggcagaggggctgaagttctccctgtccttggagaacgtgctctattacagcccaggaggggccggcagtgacaccttggtgaggtattttgcaaatgaaccatttgctgacttccaccgagtggaaggattgcaaggagtctacattgctactctgattaatggttctatgaatgaggagaacatgagatcggtcatcacctttgacaaagggggaacctgggagtttcttcaggctccagccttcacgggatatggagagaaaatcaattgtgagctttcccagggctgttcccttcatctggctcagcgcctcagtcagctcctcaacctccagctccggagaatgcccatcctgtccaaggagtcggctccaggcctcatcatcgccactggctcagtgggaaagaacttggctagcaagacaaacgtgtacatctctagcagtgctggagccaggtggcgagaggcacttcctggacctcactactacacatggggagaccacggcggaatcatcacggccattgcccagggcatggaaaccaacgagctaaaatacagtaccaatgaaggggagacctggaaaacattcatcttctctgagaagccagtgtttgtgtatggcctcctcacagaacctggggagaagagcactgtcttcaccatctttggctcgaacaaagagaatgtccacagctggctgatcctccaggtcaatgccacggatgccttgggagttccctgcacagagaatgactacaagctgtggtcaccatctgatgagcgggggaatgagtgtttgctgggacacaagactgttttcaaacggcggaccccccatgccacatgcttcaatggagaggactttgacaggccggtggtcgtgtccaactgctcctgcacccgggaggactatgagtgtgacttcggtttcaagatgagtgaagatttgtcattagaggtttgtgttccagatccggaattttctggaaagtcatactcccctcctgtgccttgccctgtgggttctacttacaggagaacgagaggctaccggaagatttctggggacacttgtagcggaggagatgttgaagcgcgactggaaggagagctggtcccctgtcccctggcagaagagaacgagttcattctgtatgctgtgaggaaatccatctaccgctatgacctggcctcgggagccaccgagcagttgcctctcaccgggctacgggcagcagtggccctggactttgactatgagcacaactgtttgtattggtccgacctggccttggacgtcatccagcgcctctgtttgaatggaagcacagggcaagaggtgatcatcaattctggcctggagacagtagaagctttggcttttgaacccctcagccagctgctttactgggtagatgcaggcttcaaaaagattgaggtagctaatccagatggcgacttccgactcacaatcgtcaattcctctgtgcttgatcgtcccagggctctggtcctcgtgccccaagagggggtgatgttctggacagactggggagacctgaagcctgggatttatcggagcaatatggatggttctgctgcctatcacctggtgtctgaggatgtgaagtggcccaatggcatctctgtggacgaccagtggatttactggacggatgcctacctggagtgcatagagcggatcacgttcagtggccagcagcgctctgtcattctggacaacctcccgcacccctatgccattgctgtctttaagaatgaaatctactgggatgactggtcacagctcagcatattccgagcttccaaatacagtgggtcccagatggagattctggcaaaccagctcacggggctcatggacatgaagattttctacaaggggaagaacactggaagcaatgcctgtgtgcccaggccatgcagcctgctgtgcctgcccaaggccaacaacagtagaagctgcaggtgtccagaggatgtgtccagcagtgtgcttccatcaggggacctgatgtgtgactgccctcagggctatcagctcaagaacaatacctgtgtcaaagaagagaacacctgtcttcgcaaccagtatcgctgcagcaacgggaactgtatcaacagcatttggtggtgtgactttgacaacgactgtggagacatgagcgatgagagaaactgccctaccaccatctgtgacctggacacccagtttcgttgccaggagtctgggacttgtatcccactgtcctataaatgtgaccttgaggatgactgtggagacaacagtgatgaaagtcattgtgaaatgcaccagtgccggagtgacgagtacaactgcagttccggcatgtgcatccgctcctcctgggtatgtgacggggacaacgactgcagggactggtctgatgaagccaactgtaccgccatctatcacacctgtgaggcctccaacttccagtgccgaaacgggcactgcatcccccagcggtgggcgtgtgacggggatacggactgccaggatggttccgatgaggatccagtcaactgtgagaagaagtgcaatggattccgctgcccaaacggcacttgcatcccatccagcaaacattgtgatggtctgcgtgattgctctgatggctccgatgaacagcactgcgagcccctctgtacgcacttcatggactttgtgtgtaagaaccgccagcagtgcctgttccactccatggtctgtgacggaatcatccagtgccgcgacgggtccgatgaggatgcggcgtttgcaggatgctcccaagatcctgagttccacaaggtatgtgatgagttcggtttccagtgtcagaatggagtgtgcatcagtttgatttggaagtgcgacgggatggatgattgcggcgattattctgatgaagccaactgcgaaaaccccacagaagccccaaactgctcccgctacttccagtttcggtgtgagaatggccactgcatccccaacagatggaaatgtgacagggagaacgactgtggggactggtctgatgagaaggattgtggagattcacatattcttcccttctcgactcctgggccctccacgtgtctgcccaattactaccgctgcagcagtgggacctgcgtgatggacacctgggtgtgcgacgggtaccgagattgtgcagatggctctgacgaggaagcctgccccttgcttgcaaacgtcactgctgcctccactcccacccaacttgggcgatgtgaccgatttgagttcgaatgccaccaaccgaagacgtgtattcccaactggaagcgctgtgacggccaccaagattgccaggatggccgggacgaggccaattgccccacacacagcaccttgacttgcatgagcagggagttccagtgcgaggacggggaggcctgcattgtgctctcggagcgctgcgacggcttcctggactgctcggacgagagcgatgaaaaggcctgcagtgatgagttgactgtgtacaaagtacagaatcttcagtggacagctgacttctctggggatgtgactttgacctggatgaggcccaaaaaaatgccctctgcttcttgtgtatataatgtctactacagggtggttggagagagcatatggaagactctggagacccacagcaataagacaaacactgtattaaaagtcttgaaaccagataccacgtatcaggttaaagtacaggttcagtgtctcagcaaggcacacaacaccaatgactttgtgaccctgaggaccccagagggattgccagatgcccctcgaaatctccagctgtcactccccagggaagcagaaggtgtgattgtaggccactgggctcctcccatccacacccatggcctcatccgtgagtacattgtagaatacagcaggagtggttccaagatgtgggcctcccagagggctgctagtaactttacagaaatcaagaacttattggtcaacactctatacaccgtcagagtggctgcggtgactagtcgtggaataggaaactggagcgattctaaatccattaccaccataaaaggaaaagtgatcccaccaccagatatccacattgacagctatggtgaaaattatctaagcttcaccctgaccatggagagtgatatcaaggtgaatggctatgtggtgaaccttttctgggcatttgacacccacaagcaagagaggagaactttgaacttccgaggaagcatattgtcacacaaagttggcaatctgacagctcatacatcctatgagatttctgcctgggccaagactgacttgggggatagccctctggcatttgagcatgttatgaccagaggggttcgcccacctgcacctagcctcaaggccaaagccatcaaccagactgcagtggaatgtacctggaccggcccccggaatgtggtttatggtattttctatgccacgtcctttcttgacctctatcgcaacccgaagagcttgactacttcactccacaacaagacggtcattgtcagtaaggatgagcagtatttgtttctggtccgtgtagtggtaccctaccaggggccatcctctgactacgttgtagtgaagatgatcccggacagcaggcttccaccccgtcacctgcatgtggttcatacgggcaaaacctccgtggtcatcaagtgggaatcaccgtatgactctcctgaccaggacttgttgtatgcaattgcagtcaaagatctcataagaaagactgacaggagctacaaagtaaaatcccgtaacagcactgtggaatacacccttaacaagttggagcctggcgggaaataccacatcattgtccaactggggaacatgagcaaagattccagcataaaaattaccacagtttcattatcagcacctgatgccttaaaaatcataacagaaaatgatcatgttcttctgttttggaaaagcctggctttaaaggaaaagcattttaatgaaagcaggggctatgagatacacatgtttgatagtgccatgaatatcacagcttaccttgggaatactactgacaatttctttaaaatttccaacctgaagatgggtcataattacacgttcaccgtccaagcaagatgcctttttggcaaccagatctgtggggagcctgccatcctgctgtacgatgagctggggtctggtgcagatgcatctgcaacgcaggctgccagatctacggatgttgctgctgtggtggtgcccatcttattcctgatactgctgagcctgggggtggggtttgccatcctgtacacgaagcaccggaggctgcagagcagcttcaccgccttcgccaacagccactacagctccaggctggggtccgcaatcttctcctctggggatgacctgggggaagatgatgaagatgcccctatgataactggattttcagatgacgtccccatggtgatagcctgaaagagctttcctcactagaaaccaaatggtgtaaatattttatttgataaagatagttgatggtttattttaaaagatgcactttgagttgcaatatgttatttttatatgggccaaaaacaaaaaacaaaaaaaaaaaaaaggaaagaaaggaatgaataaactttgtagtaatcaactgtgaacttcaaaccaggttgattttagtaacccaattgctttgatttgacattaatgtagtcttacagggctgtgcttgctgggcatgcttttacgtctgtgagataatttcggttcagtaaattggccaatctttttatttttctaagacacagaaatgtatttaataaaaacctcgagagagtgatgggtggaaccccttctccttgaaagtgtgtacagatattccattttgtttggatatagtttataggaaagtgtgtggatgtattatggcggaaggtttctttatgttattttgttaatttattgggactctgtgtaaggccaggctttagtggtcattagacaccacatgtgttatgagccccttacccatagggttgggggtgggaagagaagcatatttttttgccattccggaagcaatccatttttattcacttgtgtgtcatgtaatggtctttggcaggagagagcactgagtcattgctggagttcagttcaacagagctgcagcttgggaagccctgtaagcccacagcttcctctcttatattaattgatggaattttactgtatgtgcctctgtacaagatgtagctttgagagctacaaaatgataacactgctttattacacactggtttcattgtcattgcaaaaacttaccctggttgtgggggagagttctagatctgtgccatgatccatacactggctaatagagtacataatttttccattttccattttttgtttttacttactactgaaggatctcagatgtaaaattatgtatttggtttgagatggccacttattgtccttaaaaatccatactgatatatgcagtcattttgaattggacagtgccttctctttttttttctcctcttcttccatctccctcacccatgcccccacccaatctaaagagacagtgctgtacattctcatagagatagagaagatctaaaaagttgagactactcaatccagttaacaacagcaggagcactagagtttgttcatttattctctctgtaaaacaagctgtgctttttttcttctgcctttaaaatgccacccgtgtattcaaaccatggccacttgatacttatgtagaatccatcgtgggctgatgcaagccctttatttaggcttagtgttgtgggcaccaatgtcgagcatcgttgtgacttgtgctgtatgattctcactgaagaatttcctttcagccaagaagcagtgaggtctgggaatattccaaagtcatgtctctgaatatgtgtccttgacgtgcaagctttgtaaaaccccatccccgcttaggtgcgaggcatcaccttctcacaagtgtttagtttcttttaaccacaagtatcattcttgggtgataatatagtttcattctacttagggattgtttagaaaacaaagaaagagccaattaaattttttagtttttgaaatttttatttatatgtatacttagatgagtattttaagctgtcgacctttagtttgccatacgggtaggactgtatttcatgttaacaactggtggtaatgataagccttcttctagcgtattttctcttctttcctgtcactttcctaagtttttttttttaaagactggaattttttttggctttatcttgtcttaccgtagagatttgttcaaaactctaagccctaccacctcccctttaataagctctttaaatagttgaatcattaacaacctggtgggaggcaagtcatttaattgaaccactaggaagtgtattttcttttctttttctgccaactttttggtggcatttgtaaaagctgatataaaaggctctgagatgttattttcagttattccataggcaagcctttttacagagcatatgtctccagttggcagcttgagatatttccgagcatccggttctagctaccagtgcctcccaatgcttagtgcacagtactgtagactggccatcacccctctccttggaaaatgccactgtgctgtttgaaaaaaagcagccttttagggctagagtattttatataaacagaagagctaagttcctgaagactaagctagatagctgcagctatatgtaaattgtatatttttatgaacttttgaagcacacactcctgtttccctctgtgtagctttgtggggatttcatgtatatatgctgtctgaaagaatccagaggttggagtgccaatagaaaatgaaaacaaatgccttgtactacaggcagcctctgaaggtgaccacataactgtcttcactgtgaccaatcggagtccctgcttgcttgtgaagaaggggcttttgtaccttgttggagatgccacctcagaagttcacactgtgcaggaaaaaggttttattctctcctggcatacattagaatgtcagatgcttgcatccatgtggaccacgatgggcctctaaaaattggtgggcagggggtttgcttatgagttttctctggaaaccgattttactcctggatgtattgaatgccccttgagctttatgagatacgagtccacatggataaaatgttagagagtggagttctacagaggattccaggaagaggccatgtctgtgcagtcctagttccagacaggtgagaagctccaggaactactggctaccttgacaagctgggtaaatagttatcattctgggtaactggttgaaactctgacttttggacaagtaattcctggggttctgtctttggtagcatcaccagggatatttgggtgggacagacagaagacacacagctgcctgttctctcctgcccatcatgtttggcccactagatgaagctgtactcagcaatttagggaatgtaacccttctcagaactggccattttcaggggaagcttgggagagcaatagtatggtgagccccttagagatgagcgcctactccttcttggcgaatgctgccttcagatgcttaccaagtggtcactgcatctagtaagattatatttccagtacacttccttagggcagaaacaccatcctatcaggtttggtcagtcccttcttcatgaagggagtcatggggaattcctgaaaattttcttccttctgcagacagttggatgagtcccttagagaaggcatccagagacataactaaactgaatatcatcccatattgattttaggaattgactctaaaactctgtgcagaatcttgtgttgggattgtatcttgacattcctgttgtgttatttttcttaactggagtgtgtgctgcctttcaggtacaatttttgtgtaataaaagccagtgcattaagtttatatagactactttctatgcaagactgagatatggaatagataggaagagatatgtactgctgggtacatggacagtaagtgtgttttcagatggagtaccagcaccgaaaatgggttgagggaggatgggttgtatgtatgtttctgcccactaattttgagcagccatattatgaattaaatcgtcacagccaagtaataacccaagaatggtatgagtttcatgtgtaatagctcaaatggaataagcatgaatgctggagtggaccattatcctcaaatattctatgtcacttctcatttaaagactcttgttatgaactattagaaactttaggcaaaatcaaaagtatttgcggcaaaataaaggcctattctactcttatttaaagtgaaacactgtatacttgtttctctccaaagcgaaattaagtatttataatttcaattgcctcgataagtttccaagtcactgaaatctgctgaaggttttactgtattgttgcacaactttaagataatttttgtctcaatgtcaacttttttcactgaataaaaatttaactgggtcaagaaaacacctctttgaaaatccactgtctctgtgtgtctcgagctgttctttagagcgcaataaagatggctgacgcagtctccaaacccc

SEQ ID NO: 46 - protein, 2214 aa, Homo sapiens
MATRSSRRESRLPFLFTLVALLPPGALCEVWTQRLHGGSAPLPQDRGFLVVQGDPRELRLWARGDARGASRADEKPLRRKRSAALQPEPIKVYGQVSLNDSHNQMVVHWAGEKSNVIVALARDSLALARPKSSDVYVSYDYGKSFKKISDKLNFGLGNRSEAVIAQFYHSPADNKRYIFADAYAQYLWITFDFCNTLQGFSIPFRAADLLLHSKASNLLLGFDRSHPNKQLWKSDDFGQTWIMIQEHVKSFSWGIDPYDKPNTIYIERHEPSGYSTVFRSTDFFQSRENQEVILEEVRDFQLRDKYMFATKVVHLLGSEQQSSVQLWVSFGRKPMRAAQFVTRHPINEYYIADASEDQVFVCVSHSNNRTNLYISEAEGLKFSLSLENVLYYSPGGAGSDTLVRYFANEPFADFHRVEGLQGVYIATLINGSMNEENMRSVITFDKGGTWEFLQAPAFTGYGEKINCELSQGCSLHLAQRLSQLLNLQLRRMPILSKESAPGLIIATGSVGKNLASKTNVYISSSAGARWREALPGPHYYTWGDHGGIITAIAQGMETNELKYSTNEGETWKTFIFSEKPVFVYGLLTEPGEKSTVFTIFGSNKENVHSWLILQVNATDALGVPCTENDYKLWSPSDERGNECLLGHKTVFKRRTPHATCFNGEDFDRPVVVSNCSCTREDYECDFGFKMSEDLSLEVCVPDPEFSGKSYSPPVPCPVGSTYRRTRGYRKISGDTCSGGDVEARLEGELVPCPLAEENEFILYAVRKSIYRYDLASGATEQLPLTGLRAAVALDFDYEHNCLYWSDLALDVIQRLCLNGSTGQEVIINSGLETVEALAFEPLSQLLYWVDAGFKKIEVANPDGDFRLTIVNSSVLDRPRALVLVPQEGVMFWTDWGDLKPGIYRSNMDGSAAYHLVSEDVKWPNGISVDDQWIYWTDAYLECIERITFSGQQRSVILDNLPHPYAIAVFKNEIYWDDWSQLSIFRASKYSGSQMEILANQLTGLMDMKIFYKGKNTGSNACVPRPCSLLCLPKANNSRSCRCPEDVSSSVLPSGDLMCDCPQGYQLKNNTCVKEENTCLRNQYRCSNGNCINSIWWCDFDNDCGDMSDERNCPTTICDLDTQFRCQESGTCIPLSYKCDLEDDCGDNSDESHCEMHQCRSDEYNCSSGMCIRSSWVCDGDNDCRDWSDEANCTAIYHTCEASNFQCRNGHCIPQRWACDGDTDCQDGSDEDPVNCEKKCNGFRCPNGTCIPSSKHCDGLRDCSDGSDEQHCEPLCTHFMDFVCKNRQQCLFHSMVCDGIIQCRDGSDEDAAFAGCSQDPEFHKVCDEFGFQCQNGVCISLIWKCDGMDDCGDYSDEANCENPTEAPNCSRYFQFRCENGHCIPNRWKCDRENDCGDWSDEKDCGDSHILPFSTPGPSTCLPNYYRCSSGTCVMDTWVCDGYRDCADGSDEEACPLLANVTAASTPTQLGRCDRFEFECHQPKTCIPNWKRCDGHQDCQDGRDEANCPTHSTLTCMSREFQCEDGEACIVLSERCDGFLDCSDESDEKACSDELTVYKVQNLQWTADFSGDVTLTWMRPKKMPSASCVYNVYYRVVGESIWKTLETHSNKTNTVLKVLKPDTTYQVKVQVQCLSKAHNTNDFVTLRTPEGLPDAPRNLQLSLPREAEGVIVGHWAPPIHTHGLIREYIVEYSRSGSKMWASQRAASNFTEIKNLLVNTLYTVRVAAVTSRGIGNWSDSKSITTIKGKVIPPPDIHIDSYGENYLSFTLTMESDIKVNGYVVNLFWAFDTHKQERRTLNFRGSILSHKVGNLTAHTSYEISAWAKTDLGDSPLAFEHVMTRGVRPPAPSLKAKAINQTAVECTWTGPRNVVYGIFYATSFLDLYRNPKSLTTSLHNKTVIVSKDEQYLFLVRVVVPYQGPSSDYVVVKMIPDSRLPPRHLHVVHTGKTSVVIKWESPYDSPDQDLLYAIAVKDLIRKTDRSYKVKSRNSTVEYTLNKLEPGGKYHIIVQLGNMSKDSSIKITTVSLSAPDALKIITENDHVLLFWKSLALKEKHFNESRGYEIHMFDSAMNITAYLGNTTDNFFKISNLKMGHNYTFTVQARCLFGNQICGEPAILLYDELGSGADASATQAARSTDVAAVVVPILFLILLSLGVGFAILYTKHRRLQSSFTAFANSHYSSRLGSAIFSSGDDLGEDDEDAPMITGFSDDVPMVIA

SEQ ID NO: 47 - DNA, 6053 bp, Homo sapiens
taggttgtgacagttggaagtgtcatgtacaacatgcggcgattaagtctttcacccaccttttcaatgggatttcatctgttagttactgtgagtctcttattttcccatgtggaccatgtaattgctgagacagaaatggaaggagaaggaaatgaaactggtgaatgtactggatcatattactgtaagaaaggggtgattttgcccatttgggaaccccaagacccttcttttggggacaaaattgctagagctactgtgtattttgtggccatggtctacatgtttcttggagtctctatcatagctgatcggttcatgtcctctatagaagtcatcacatctcaagaaaaagaaataaccataaagaaacccaatggagagaccaccaagacaactgtgaggatctggaatgaaacagtttctaacctgaccttgatggccctgggatcttctgctcctgagattctcctttcagtaattgaagtgtgtggccataacttcactgcaggagacctcggtcctagcaccatcgtgggaagtgctgcattcaatatgttcatcattattgcactctgtgtttatgtggtgcctgacggagagacaaggaagattaagcatttgcgtgtcttctttgtgacagcagcctggagcatctttgcctacacctggctttacattattttgtctgtcatatctcctggtgttgtggaggtctgggaaggtttgcttactttcttcttctttcccatctgtgttgtgttcgcttgggtagcggataggagacttctgttttacaagtatgtctacaagaggtatcgagctggcaagcagagggggatgattattgaacatgaaggagacaggccatcttctaagactgaaattgaaatggacgggaaagtggtcaattctcatgttgaaaatttcttagatggtgctctggttctggaggtggatgagagggaccaagatgatgaagaagctaggcgagaaatggctaggattctgaaggaacttaagcagaagcatccagataaagaaatagagcaattaatagaattagctaactaccaagtcctaagtcagcagcaaaaaagtagagcattttatcgcattcaagctactcgcctcatgactggagctggcaacattttaaagaggcatgcagctgaccaagcaaggaaggctgtcagcatgcacgaggtcaacactgaagtgactgaaaatgaccctgttagtaagatcttctttgaacaagggacatatcagtgtctggagaactgtggtactgtggcccttaccattatccgcagaggtggtgatttgactaacactgtgtttgttgacttcagaacagaggatggcacagcaaatgctgggtctgattatgaatttactgaaggaactgtggtgtttaagcctggtgatacccagaaggaaatcagagtgggtatcatagatgatgatatctttgaggaggatgaaaatttccttgtgcatctcagcaatgtcaaagtatcttctgaagcttcagaagatggcatactggaagccaatcatgtttctacacttgcttgcctcggatctccctccactgccactgtaactatttttgatgatgaccacgcaggcatttttacttttgaggaacctgtgactcatgtgagtgagagcattggcatcatggaggtgaaagtattgagaacatctggagctcgaggaaatgttatcgttccatataaaaccatcgaagggactgccagaggtggaggggaggattttgaggacacttgtggagagctcgaattccagaatgatgaaattgtcaaaacaatatcagtcaaggtaattgatgatgaggagtatgagaaaaacaagaccttcttccttgagattggagagccccgcctggtggagatgagtgagaagaaagccctgttattgaatgagcttggtggcttcacaataacaggaaaatacctgtttggccaacctgtcttcaggaaggttcatgctagagaacatccgattctctctactgtaatcaccattgcagacgaatatgatgacaagcagccactgaccagcaaagaggaagaggagaggcgcattgcagaaatggggcgccccatcctgggagagcacaccaagttggaagtgatcattgaagaatcctatgaattcaagagtactgtggacaaactcattaagaagacaaacctggcccttgtggttgggactaacagctggagagaacagttcattgaagctatcactgtcagtgctggggaagatgatgacgacgatgaatgtggggaagagaagctgccctcctgtttcgattacgtgatgcactttctgactgtgttctggaaggtcctgtttgccttcgtcccccctactgaatactggaatggctgggcgtgtttcattgtctccatcctcatgattggcctactgacagctttcattggagacctggcttcccactttggctgcaccattggcctgaaagattctgtgactgcagtcgtgttcgtcgcacttggaacatcagtgccagacacatttgccagcaaagtggcagccacccaggaccagtatgcagacgcctccataggtaacgtcacgggcagcaacgcggtgaatgtcttcctgggaatcggtgtggcctggtccatcgctgccatctaccacgcagccaatggggaacagttcaaagtgtcccctggcacactagctttctctgtcactctcttcaccatttttgctttcatcaatgtgggggtgctgctgtatcggcggaggccagaaatcggaggtgagctgggtgggccccggactgccaagctcctcacatcctgcctctttgtgctcctatggctcttgtacattttcttctcctccctggaggcctactgccacataaaaggcttctaaaggaactatcagatatagtaaatttatatatatacatatatatacataaaaattatgtataatggacagaggaaactgacatttgtcatgttcacttacctgctgatggaatccagcttcaagagcatactctgtactagggccgaagtaaaaaaccatcacctcccattcccaggggcatcatcatgttcaacaaggcatggaggcagggccatctttgcagctcagtctagaagggctgcactctctccaggttgataaatccttaaggctttgatttgttttgtttttggttttgttttcagtggagctggggaggtagttaatgtttggctttatttttgttattttgttttgttttgtttttttgggagagtcagggttgttgcttttctttgtggaaagtgaaaccatccaaatgtaaatgggttttggtaaaaatttaaatcattagtattccccctcacctcccccaatcactttaaaacttattttggattaagaaaaaatctgggcatggaagaagaaagaagcatgtcttcatcgtattaccaaagttcatgcttatctccggaatgtgagtggaggtgaagctgcctccaagaagaagcataaaagtggaatggagccaggaaatccgatggttctagaaatagtctgatatttaaacatgtgatacctggcagtctcgtttaacaggtacaaggaaaacgtgcctagattcccaggaacgtgcaaaatcctttctttcttatctctttagctctggactgtgattggcaaggtccttcttccagcattcagcccagctaagcccccaggtgccccatcccaaccctgttcctcctgtccacctgccatcccctatgcaaacagtaagaataaccccattcaaaaagcacatcatcgttttccatttgcattaacatgtgtctcagtcccatgttgccgttgcttgggattgtctgtcagttttattttcaaaggcatccatggcttgcacaatcctgttccagtcatgactgaacatttgctccttcttcatgtgccgttcggaaatgttgttgtgatacctgttacacagtgcatggtgaaaaacaaataaaacaaaacaaagagtatctgtatatagtagagtatagtacatactgttctcccatttggcaatgttgattggacattgaagacataagtgagttttcttttcacctgagttgttacttttgtgctgttattgagtttgattaattactagggataaaaggagaaaatggattattgttcacggttctgcacattcatttctaagaagcaataactgtcatgtggggagaagttaaagctattgagaggatagcaggcaaactacaaagatcttcatggaaaattagccatgtggaacacatcagaggcctctaaaaatcacccattaattcaggaaggccaaggagaaaggccttatagagacgttgatatgttggatgtgcctaggctttcagagccaccctttccacaacacccctccctgcaaagtatttatttcacatctgcactgtctggcacagatggtagatagtgctggtttgttcattttatttttttacttaaaaggctattttgagccctgtttctttcactgtccagtctagtcctctttgattatatcagtagttgctgagtaagaaagaagccagggtgaccaacgggcctttaaaagtgttgtctcctctacttatgctgaaagagaaggcaattaaataagactagtacctcccaggaggattggactgggatatttttaaccctttaaaaagaatagctgtttctatgttaaaataccaaagaacatggataaacccaacattccaaagtagtgagtccactaatgagaaaaataatagaatgactttggtcacctctcggagacttctgtgtctataaggaatcccaggctggagacattcctagccctctgtattgattcaaaaatacttaataaattaaagctgttgagacttattttttcttctgtcactcagtaaccatgatccttcctcatttaataaacatttggtgactgaatgagtaattaaatgctggttacccacttaatgtgccaggtagtatgatactttctggggactaagccatgaacaaaacagtctagatccctgccctcagaagggttacagtttatgtgattactattttcatgagtaaaagtgaagaaagccatatggaaagatttttatcttgcaagaaaaaacaattatgaaactcttttaacataaacacactgaaactgtatcaaagcaattgtccaaattgtatttatacccaagaatttctttaactaagagagcataaggcatatgtttggaaaaccaccctctttatctttgaccgacttgcagataaatatatctctccattttaaaccaagaagggcaatcatgttggtgatccagatcactgagaaagcccagtgtatcccatcttttatctttgttggcaatggaacttttctatggcccacactttacaattctttgtcattctaacccatccttcccatccttattttttttttttttgagaattgctaaatggaaagctagcctagaagcaccaagtaaatatattcaaggaatataagttgtttaaacattagaaaaatttttgcactcattttttagctgtattaggaatgtcaataatcctgtagcaaattttcacagagaactttaagaaattcttgcattggtcgatttcaatttgaaagctttttggtttgtttgctttttaaattttcatgttctaggaaactatgattctggttgttcaggattgttattattatagttgtgtaaaattattttattttgtgtgtattgtgcacagcttggggggggggcgggaaatgcactaattgtgctcttccttataaatggtacatattactgacacagacaaataaagtttctaattgtttctgatttaatcactagtgatacagcatattctgtatgaaatgttttctcctttctcattgtcatctacttcattttttgttttcatgttttgaagaaataaaaaccaaaatggta

SEQ ID NO: 48 - protein, 973 aa, Homo sapiens
MYNMRRLSLSPTFSMGFHLLVTVSLLFSHVDHVIAETEMEGEGNETGECTGSYYCKKGVILPIWEPQDPSFGDKIARATVYFVAMVYMFLGVSIIADRFMSSIEVITSQEKEITIKKPNGETTKTTVRIWNETVSNLTLMALGSSAPEILLSVIEVCGHNFTAGDLGPSTIVGSAAFNMFIIIALCVYVVPDGETRKIKHLRVFFVTAAWSIFAYTWLYIILSVISPGVVEVWEGLLTFFFFPICVVFAWVADRRLLFYKYVYKRYRAGKQRGMIIEHEGDRPSSKTEIEMDGKVVNSHVENFLDGALVLEVDERDQDDEEARREMARILKELKQKHPDKEIEQLIELANYQVLSQQQKSRAFYRIQATRLMTGAGNILKRHAADQARKAVSMHEVNTEVTENDPVSKIFFEQGTYQCLENCGTVALTIIRRGGDLTNTVFVDFRTEDGTANAGSDYEFTEGTVVFKPGDTQKEIRVGIIDDDIFEEDENFLVHLSNVKVSSEASEDGILEANHVSTLACLGSPSTATVTIFDDDHAGIFTFEEPVTHVSESIGIMEVKVLRTSGARGNVIVPYKTIEGTARGGGEDFEDTCGELEFQNDEIVKTISVKVIDDEEYEKNKTFFLEIGEPRLVEMSEKKALLLNELGGFTITGKYLFGQPVFRKVHAREHPILSTVITIADEYDDKQPLTSKEEEERRIAEMGRPILGEHTKLEVIIEESYEFKSTVDKLIKKTNLALVVGTNSWREQFIEAITVSAGEDDDDDECGEEKLPSCFDYVMHFLTVFWKVLFAFVPPTEYWNGWACFIVSILMIGLLTAFIGDLASHFGCTIGLKDSVTAVVFVALGTSVPDTFASKVAATQDQYADASIGNVTGSNAVNVFLGIGVAWSIAAIYHAANGEQFKVSPGTLAFSVTLFTIFAFINVGVLLYRRRPEIGGELGGPRTAKLLTSCLFVLLWLLYIFFSSLEAYCHIKGF

SEQ ID NO: 49 - DNA, 1983 bp, Homo sapiens
ggggcggggcgcgctacccgcagcccccggagctcggctaactcggcgcccagtgcacggccgcaccatggggtcccgccacttcgaggggatttatgaccacgtggggcacttcggcagattccagagagtcctctatttcatatgtgccttccagaacatctcttgtggtattcactacttggcttctgtgttcatgggagtcacccctcatcatgtctgcaggcccccaggcaatgtgagtcaggttgttttccataatcactctaattggagtttggaggacaccggggccctgttgtcttcaggccagaaagattatgttacggtgcagttgcagaatggtgagatctgggagctctcaaggtgtagcaggaataagagggagaacacatcgagtttgggctatgaatacactggcagtaagaaagagtttccttgtgtggatggctacatatatgaccagaacacatggaaaagcactgcggtgacccagtggaacctggtctgtgaccgaaaatggcttgcaatgctgatccagcccctatttatgtttggagtcctactgggatcggtgacttttggctacttttctgacaggctaggacgccgggtggtcttgtgggccacaagcagtagcatgtttttgtttggaatagcagcggcgtttgcagttgattattacaccttcatggctgctcgcttttttcttgccatggttgcaagtggctatcttgtggtggggtttgtctatgtgatggaattcattggcatgaagtctcggacatgggcgtctgtccatttgcattccttttttgcagttggaaccctgctggtggctttgacaggatacttggtcaggacctggtggctttaccagatgatcctctccacagtgactgtcccctttatcctgtgctgttgggtgctcccagagacacctttttggcttctctcagagggacgatatgaagaagcacaaaaaatagttgacatcatggccaagtggaacagggcaagctcctgtaaactgtcagaacttttatcactggacctacaaggtcctgttagtaatagccccactgaagttcagaagcacaacctatcatatctgttttataactggagcattacgaaaaggacacttaccgtttggctaatctggttcactggaagtttgggattctactcgttttccttgaattctgttaacttaggaggcaatgaatacttaaacctcttcctcctgggtgtagtggaaattcccgcctacaccttcgtgtgcatcgccatggacaaggtcgggaggagaacagtcctggcctactctcttttctgcagtgcactggcctgtggtgtcgttatggtgatcccccagaaacattatattttgggtgtggtgacagctatggttggaaaatttgccatcggggcagcatttggcctcatttatctttatacagctgagctgtatccaaccattgtaagatcgctggctgtgggaagcggcagcatggtgtgtcgcctggccagcatcctggcgccgttctctgtggacctcagcagcatttggatcttcataccacagttgtttgttgggactatggccctcctgagtggagtgttaacactaaagcttccagaaacccttgggaaacggctagcaactacttgggaggaggctgcaaaactggagtcagagaatgaaagcaagtcaagcaaattacttctcacaactaataatagtgggctggaaaaaacggaagcgattacccccagggattctggtcttggtgaataaatgtgccatgcctgctgtctagcacctgaaatattatttaccctaatgcctttgtattagaggaatcttattctcatctcccatatgttgtttgtatgtctttttaataaattttgtaagaaaattttaaagcaaatatgttataaaagaaataaaaactaagatgaaaaaaaaaaaaaaaa

SEQ ID NO: 50 - protein, 577 aa, Homo sapiens
MGSRHFEGIYDHVGHFGRFQRVLYFICAFQNISCGIHYLASVFMGVTPHHVCRPPGNVSQVVFHNHSNWSLEDTGALLSSGQKDYVTVQLQNGEIWELSRCSRNKRENTSSLGYEYTGSKKEFPCVDGYIYDQNTWKSTAVTQWNLVCDRKWLAMLIQPLFMFGVLLGSVTFGYFSDRLGRRVVLWATSSSMFLFGIAAAFAVDYYTFMAARFFLAMVASGYLVVGFVYVMEFIGMKSRTWASVHLHSFFAVGTLLVALTGYLVRTWWLYQMILSTVTVPFILCCWVLPETPFWLLSEGRYEEAQKIVDIMAKWNRASSCKLSELLSLDLQGPVSNSPTEVQKHNLSYLFYNWSITKRTLTVWLIWFTGSLGFYSFSLNSVNLGGNEYLNLFLLGVVEIPAYTFVCIAMDKVGRRTVLAYSLFCSALACGVVMVIPQKHYILGVVTAMVGKFAIGAAFGLIYLYTAELYPTIVRSLAVGSGSMVCRLASILAPFSVDLSSIWIFIPQLFVGTMALLSGVLTLKLPETLGKRLATTWEEAAKLESENESKSSKLLLTTNNSGLEKTEAITPRDSGLGE

SEQ ID NO: 51 - DNA, 3905 bp, Homo sapiens
gcgacgaggagggcgacgacgaggagacgggcagcggcgaggaggaggaagaggaggcggaggcggcggccgggtgggagcgcagcgaggacgcgcggctgctgcgcgcagggctgcctcctgccgctgtccccgccgcggccgcccgcgacaggagcggccgccgcccgccgaggccgccgcccggccgcccgaggatgcggccgtccggcgacgaggaccgcgcgcgtcgccgccgccgccgccgccgccggagggaccttctgctgagccagctctgcttcctggcctcggtggcgctgctgctctggtcgctgtcgagcctgcgagagcagaaggagcttgacctcatggacctcgtaggggaagacagaaagtggatgatggcgaggaagctgatgcaggtgaacgacactctgacttccgaagatgccggactccggaacagcaagaactgcaccgaaccagccctgcatgaattccccaatgacatcttcacaaacgaggatagaagacaaggtgcggtggtcctccatgtgctctgtgccatatacatgttctatgcgctggccattgtgtgtgatgacttcttcgtcccttccttggaaaagatctgtgagcgcctgcacctcagtgaagatgtggctggggccacattcatggcagcgggaagttcggccccagagctgttcacatcggtcataggggtcttcatcaccaaaggcgatgtgggagttggcaccatcgtgggctcagcggtattcaacatcctgtgcatcattggtgtctgtgggctctttgctgggcaggttgtggctctttcctcctggtgcctgctgagggattctatttactacacgctgtctgtgatcgcgctcatcgtgtttatttatgatgaaaaagtttcctggtgggagtctttagtccttgtgctgatgtatcttatctacattgtcatcatgaaatataacgcttgcatacatcagtgctttgagaggaggacaaaaggtgccgggaacatggtcaacggattggccaacaatgctgaaattgatgacagcagcaactgcgacgcaactgtggtgctacttaagaaagcaaatttccaccgcaaagcatcagtgatcatggtagacgagctgctgtcagcctacccacaccagctttccttctctgaggctggccttcgaatcatgataaccagccactttccccccaagacccggctctccatggccagtcgcatgttgatcaatgagagacaaagattgataaacagcagggcttataccaacggggaatctgaggtggccatcaaaatcccaattaagcacaccgtggagaatgggacagggcccagcagtgccccagacaggggcgtgaatgggacacggagggacgatgttgtggctgaggctggcaacgaaacagagaatgaaaatgaggacaatgagaatgatgaggaggaagaggaggacgaggatgatgatgaaggaccgtacacaccattcgacaccccctcgggtaaactggaaacagtgaaatgggcgttcacctggccgctgagtttcgtcttatacttcactgtacccaactgcaacaagccgcgctgggagaaatggttcatggtgacgtttgcttcctccacgctgtggatcgcagccttctcctacatgatggtgtggatggtcacaatcattggttacaccctggggattcctgacgtcatcatggggatcaccttcctggctgctgggaccagcgtgcctgactgcatggccagcctcattgtggccagacaagggatgggggacatggctgtgtccaactccattgggagcaacgtgtttgacatcctgattggcctcggtctcccctgggctctgcagaccctggctgtggattacggatcctacatccggctgaatagcagggggctgatctactccgtaggcttgctcctggcctctgtttttgtcacggtgttcggcgtccacctgaacaagtggcagctggacaagaagctgggctgtgggtgcctcctcctgtatggtgtgttcctgtgcttctccatcatgactgagttcaacgtgttcacctttgtgaacctgcccatgtgcggggaccactgagccgccgggtgcccacagaggctcagctccttcttttctgtgcaatacgagacccggccgcaccccgagtcacacaggcccccggggccacggcgttcgtctctcctgtgctgtcctcaggcctccgctcctgttttggtggcccaggctctcccctgacccatcctcgctcccccacctccttgggtcatgcccacccaccctttcctgcctcctccgtgtgaagacatccaacatccacgtgacttttccagctccatttttgaacagtgactgagattctagaaaaactggctgctaactggcctgagccaggcaacactgattccaatccctcctccttttttaagttatttgatggaagactcacctaatttgtgacctgagactgttgaagaaatagagaggagggggcccgttgattacagagagcatttgggattttgtttggtttggagatgatgcctaggttactgggtttggggggattgttttcttttgggggccttccccttttactccttttcttccagagatcaagagcttctcttgcatcttcttccactgggctctggattaatcaattacccaaaggctgcacctgccgtgttgtctgggcttgcatcccagatgtgttggagtatgcatggatgtagtgctttttagaggagccactgggcaaggccaccaagaacaaatgcatgacattttatagccaaggacgcctcgctaaagtcttatgggcgtcccctggggttgggggggcacaaggttttggaggaagaagacaacttccctcattccatcatcaccatctctttctcactaggttctttctagttttcaagcaatagttctagcctgccttggacaagggggccccagttaaacaaactacccatccatgagctgccaggcagtcaaaaacagaagcttccccgacttgtgagtccctgagatgtgctcttgttgtttggcatttggggtgacagggagtgacccagaggccaccactgcttttcatgcaggagttacagacactggtttcttggaaaatggagagaagcgcactttgcacagacgtcgtcaattaagtcccaatttgccacttggtattgagtacactggaccctgaccactggctcttgggcaaacgtccttcctcacggggcgcctccgccaagccggcccagctgcacccctcccttcctggagggatggccagggaaggagaaaacagagaactgacacctttgaaaccacagaatgtgttacatgcagactcgctcaagggcataagttattgtgaacgtttttgccaatcactgctcaacagccctgctagattttgtatgatgctgaattattatgcagactaattccacccagttgagacacaccatgcttgttcacttgtatttattgaaactgtggattcttgcccgtgctgtcccttgtatttactttaagcactgatcacttatcattcattcggtatggttttccctgtcccttgtacacattctggtatgaatttgtaaaaataacctgctacaaattggttgaatgtttctgtctgtggtgcgaaccagcattaacggatggggcacgtgcccaactgaggaacaggagaagaaatcaccaatttgggctctcagagctaagacacacttattgattctgttgcacattttgcactggtttatggcgattgttttcttggacggatagtgtaaaataaacttctctgttctctaaaaaaaaaaaaaaaaa

SEQ ID NO: 52 - protein, 644 aa, Homo sapiens
MRPSGDEDRARRRRRRRRRRDLLLSQLCFLASVALLLWSLSSLREQKELDLMDLVGEDRKWMMARKLMQVNDTLTSEDAGLRNSKNCTEPALHEFPNDIFTNEDRRQGAVVLHVLCAIYMFYALAIVCDDFFVPSLEKICERLHLSEDVAGATFMAAGSSAPELFTSVIGVFITKGDVGVGTIVGSAVFNILCIIGVCGLFAGQVVALSSWCLLRDSIYYTLSVIALIVFIYDEKVSWWESLVLVLMYLIYIVIMKYNACIHQCFERRTKGAGNMVNGLANNAEIDDSSNCDATVVLLKKANFHRKASVIMVDELLSAYPHQLSFSEAGLRIMITSHFPPKTRLSMASRMLINERQRLINSRAYTNGESEVAIKIPIKHTVENGTGPSSAPDRGVNGTRRDDVVAEAGNETENENEDNENDEEEEEDEDDDEGPYTPFDTPSGKLETVKWAFTWPLSFVLYFTVPNCNKPRWEKWFMVTFASSTLWIAAFSYMMVWMVTIIGYTLGIPDVIMGITFLAAGTSVPDCMASLIVARQGMGDMAVSNSIGSNVFDILIGLGLPWALQTLAVDYGSYIRLNSRGLIYSVGLLLASVFVTVFGVHLNKWQLDKKLGCGCLLLYGVFLCFSIMTEFNVFTFVNLPMCGDH

SEQ ID NO: 53 - DNA, 2454 bp, Homo sapiens
ctttagcaatggggaaataccgtagactgttccatcaggacaatgctgggcctgcagtccccagggggcacccacttacttagccaaaccccagacgtttcatttaaaagcagaagtgaaaggaagaccaggttcctgaaagggttattctgacttaatctggctataaaaatgctattggctgttatttggcatggccaaagtgcacccagaatgtcttctctctccattcagtgcacgcgttactttggctaaaaggaggtgagcggcactctgcccttccagagcaagcatggagcaacaggatcagagcatgaaggaagggaggctgacgcttgtgcttgccctggcaaccctgatagctgcctttgggtcatccttccagtatgggtacaacgtggctgctgtcaactccccagcactgctcatgcaacaattttacaatgagacttactatggtaggaccggtgaattcatggaagacttccccttgacgttgctgtggtctgtaaccgtgtccatgtttccatttggagggtttatcggatccctcctggtcggccccttggtgaataaatttggcagaaaaggggccttgctgttcaacaacatattttctatcgtgcctgcgatcttaatgggatgcagcagagtcgccacatcatttgagcttatcattatttccagacttttggtgggaatatgtgcaggtgtatcttccaacgtggtccccatgtacttaggggagctggcccctaaaaacctgcggggggctctcggggtggtgccccagctcttcatcactgttggcatccttgtggcccagatctttggtcttcggaatctccttgcaaacgtagatggctggccgatcctgctggggctgaccggggtccccgcggcgctgcagctccttctgctgcccttcttccccgagagccccaggtacctgctgattcagaagaaagacgaagcggccgccaagaaagccctacagacgctgcgcggctgggactctgtggacagggaggtggccgagatccggcaggaggatgaggcagagaaggccgcgggcttcatctccgtgctgaagctgttccggatgcgctcgctgcgctggcagctgctgtccatcatcgtcctcatgggcggccagcagctgtcgggcgtcaacgctatctactactacgcggaccagatctacctgagcgccggcgtgccggaggagcacgtgcagtacgtgacggccggcaccggggccgtgaacgtggtcatgaccttctgcgccgtgttcgtggtggagctcctgggtcggaggctgctgctgctgctgggcttctccatctgcctcatagcctgctgcgtgctcactgcagctctggcactgcaggacacagtgtcctggatgccatacatcagcatcgtctgtgtcatctcctacgtcataggacatgccctcgggcccagtcccatacccgcgctgctcatcactgagatcttcctgcagtcctctcggccatctgccttcatggtggggggcagtgtgcactggctctccaacttcaccgtgggcttgatcttcccgttcatccaggagggcctcggcccgtacagcttcattgtcttcgccgtgatctgcctcctcaccaccatctacatcttcttgattgtcccggagaccaaggccaagacgttcatagagatcaaccagattttcaccaagatgaataaggtgtctgaagtgtacccggaaaaggaggaactgaaagagcttccacctgtcacttcggaacagtgactctggagaggaagccagtggagctggtctgccaggggcttcccactttggcttatttttctgacttctagctgtctgtgaatatccagaaataaaacaactctgatgtggaatgcagtcctcatctccagcctccccaccccagtgggaactgtgcaaagggctgccttgctgttcttgaagctgggctgtctctctccatgttggcctgtcaccagacccgagtcaattaaacagctggtcctccactttgctggttcagccttcgtgtggctcctggtaacgtggctccaccttgatgggtcaacctttgtgtggctcctggtaacataacaacaacagttactatagtggtgagatggaaggaatcaaattttgccagagaaactaacttggtggccccgacaggtcttccggggccatgggcatttgtttagagccaaattcatcctcttaccagatccttttccagaaatacctgtctaggaaggtgtgatgtcagaaacaatgacatccagaaagctgaggaacaggttcctgtggagacactgagtcagaattcttcatcctaaattattttgttagtggaaaatggaattgcttctgtgtagtcaataaaatgaacctgatcacttttcaaaaaaaaaaaaaaaaaa

SEQ ID NO: 54 - protein, 501 aa, Homo sapiens
MEQQDQSMKEGRLTLVLALATLIAAFGSSFQYGYNVAAVNSPALLMQQFYNETYYGRTGEFMEDFPLTLLWSVTVSMFPFGGFIGSLLVGPLVNKFGRKGALLFNNIFSIVPAILMGCSRVATSFELIIISRLLVGICAGVSSNVVPMYLGELAPKNLRGALGVVPQLFITVGILVAQIFGLRNLLANVDGWPILLGLTGVPAALQLLLLPFFPESPRYLLIQKKDEAAAKKALQTLRGWDSVDREVAEIRQEDEAEKAAGFISVLKLFRMRSLRWQLLSIIVLMGGQQLSGVNAIYYYADQIYLSAGVPEEHVQYVTAGTGAVNVVMTFCAVFVVELLGRRLLLLLGFSICLIACCVLTAALALQDTVSWMPYISIVCVISYVIGHALGPSPIPALLITEIFLQSSRPSAFMVGGSVHWLSNFTVGLIFPFIQEGLGPYSFIVFAVICLLTTIYIFLIVPETKAKTFIEINQIFTKMNKVSEVYPEKEELKELPPVTSEQ

SEQ ID NO: 55 - DNA, 3909 bp, Homo sapiens
agagggtgtcaccatctaagctgaaagtgtttggggagatcagacattgctgtctggtgctcctctctcagtggccatcatgtctttgacatctgcttaccagcataaattagcagagaagctcactatcctgaatgatcgcggtcagggggttctcatccgtatgtataacatcaagaagacttgttcagaccccaaatctaagccacctttcttactggaaaagtccatggaaccatctctcaagtatatcaacaagaaatttcccaacatagatgtccgaaacagcacgcaacatttaggaccagtacatcgtgaaaaagccgagataattagattcctcaccaactactaccagtcatttgtggatgtcatggaatttcgggatcatgtatatgaacttctcaacaccattgatgcctgccagtgccattttgatatcaatctcaactttgatttcactcggagttacctggacttgattgtaacttacacctcagtcattttacttctgtcacggattgaagatcggcggatactcattggcatgtacaattgtgcccatgagatgctgcatgggcatggtgaccccagttttgcccgtctgggtcagatggtcttggagtatgaccaccctctgaagaagctgacagaagagtttgggcctcacacaaaggctgtgagtggagccctcctctctttgcatttcctctttgtccgaagaaaccagggggctgagcagtggcgcagtgcccaacttctaagcctcatcagcaaccccccagccatgattaaccctgctaattcagatacaatggcctgtgagtatctgtctgtggaagtaatggagcgctggattatcattgggtttcttctttgtcatgggtgcctcaactccaatagccagtgccagaagctgtggaagctgtgtctgcagggctccctctacatcacccttatccgtgaggatgtgctgcaggtgcacaaagtcaccgaggacctgtttagcagtttgaaagggtatggcaagagagtggcagacataaaggagagcaaggaacatgtaattgcaaacagtggccagtttcattgtcaacggcggcaatttctgcggatggcagtgaaggagctggagactgtgttggctgatgaaccgggactactgggtcctaaggctctttttgctttcatggccctgtccttcattcgtgatgaggtcacctggctggttcgccacacagagaatgtcaccaagacaaagacacctgaggactatgctgactcgagcattgcagagctacttttcttgttggaggggattaggtctctggtccgaagacacatcaaagtgatacagcaataccaccttcagtacttggcaagatttgatgctcttgtgctcagtgacatcattcagaacttgtctgtgtgtccagaggaggagtccatcatcatgtcctcattcgtcagtatcctctcctctctgaatctcaaacaagttgataatggagaaaaatttgaattctcaggattgaggctggactggttccgcctacaggcatacactagcgtggctaaggcccctctgcacctgcatgagaaccctgacttagccaaggtgatgaacctcattgtcttccactcccgaatgctggactccgtagaaaaattgctggtggaaacttctgatctgtctactttctgctttcatcttcgtatctttgagaagatgtttgccatgaccttggaggaatctgccatgttgcgttatgccattgctttccccctgatttgtgctcactttgtccactgcactcatgagatgtgcccagaggagtacccccacctcaagaaccatggtcttcaccactgcaactccttcctggaagagttggccaagcagaccagcaattgcgtcctggagatctgtgctgagcagcgaaacctgagcgagcagcttctacctaagcactgtgccactacaatcagcaaagccaagaacaagaaaaccaggaagcagaggcagactcccagaaaaggagagcccgagagggacaagccaggagctgagagtcaccggaagaaccgcagcattgtcaccaacatggacaagctacacctaaacttgacagaactggcactgacaatgaatcatgtatacagtttctccgtgtttgaacatactatcttcccttctgagtacctcagcagccacctggaggccagactcaacagagccattgtgtggctggctggctacaatgccacgacccaggagatcgtacggccttctgagctgttggcaggagtcaaagcatacattggtttcatacagtcactggcccagtttttgggtgcagatgcttccagagtcatccgcaacgccctcctgcagcagacacaaccactggattcctgtggggaacagacaatcaccacactctacacaaactggtacctggaaagtctgcttagacaggcaagcagtgggaccatcatcctctccccagccatgcaggccttcgtcagcctgcccagagaaggggagcagaacttcagtgcagaggagttctctgacatctctgagatgcgggccttggcagaactcctgggcccctatggcatgaagttcctgagtgaaaacctgatgtggcatgtgacctctcagattgtggagctgaagaagctggtggtggaaaacatggacatacttgttcagatcagatccaactttagcaagccggacttgatggcttccctgctgccccagctgacaggggctgaaaatgtgctaaagcgcatgaccatcattggggttatcctcagtttcagggccatggcccaagagggacttcgggaggttttctcctcccactgcccatttcttatgggtcccattgagtgcttgaaggagtttgtcactccagacacagacatcaaggtgaccttgagtatctttgagctggcatctgctgcaggtgtgggctgtgacattgacccagccttggtggctgccattgctaatctgaaagctgatacttcatctcctgaggaggaatataaggtggcctgcctgctcttgatctttctggcagtttccctcccactccttgccactgacccttcttccttttatagcattgagaaggatggttacaacaacaatattcattgcttgaccaaagccatcatccaggtgtctgctgccctcttcacgctctacaacaagaacattgaaactcacctcaaggaatttctggtggtggcctctgtcagcctcttgcagctgggccaggagactgacaagcttaaaaccagaaatcgagaatccatttctctgctcatgcgcttggtggtggaggagtcatccttcctgaccctggacatgctggagtcctgtttcccttatgtcctgcttcgaaatgcctatcgggaggtgtctcgggccttccacctaaactgaatgcctgccagtacccactgaagagccctttggaccttcctaaacccttgccatagtggaagctgtggtcactttcgcagggggtgggaatggggtggggtcactaaggagagagggtcaggagccagagttgatgagcagatctgtggaagaacaatccagggctgagaaatcgtagagcagtgaggcaggctgggagcatggaggacagcttatggaaaaagttagggcgtggggccacatgtgtgaattttacaatgaaaaaaggagtaacgtacaagtatattttctatcttctggtgacttgagcttgagctctgacaggcatgggcctctccgaccttcatcactattcttaggataatgctggcgggcagagatgatcaatcatcatattaaatcataatgagcttataatcctcccactggaaaaaaaaaaaaaaaaa

SEQ ID NO: 56 - protein, 1127 aa, Homo sapiens
MSLTSAYQHKLAEKLTILNDRGQGVLIRMYNIKKTCSDPKSKPPFLLEKSMEPSLKYINKKFPNIDVRNSTQHLGPVHREKAEIIRFLTNYYQSFVDVMEFRDHVYELLNTIDACQCHFDINLNFDFTRSYLDLIVTYTSVILLLSRIEDRRILIGMYNCAHEMLHGHGDPSFARLGQMVLEYDHPLKKLTEEFGPHTKAVSGALLSLHFLFVRRNQGAEQWRSAQLLSLISNPPAMINPANSDTMACEYLSVEVMERWIIIGFLLCHGCLNSNSQCQKLWKLCLQGSLYITLIREDVLQVHKVTEDLFSSLKGYGKRVADIKESKEHVIANSGQFHCQRRQFLRMAVKELETVLADEPGLLGPKALFAFMALSFIRDEVTWLVRHTENVTKTKTPEDYADSSIAELLFLLEGIRSLVRRHIKVIQQYHLQYLARFDALVLSDIIQNLSVCPEEESIIMSSFVSILSSLNLKQVDNGEKFEFSGLRLDWFRLQAYTSVAKAPLHLHENPDLAKVMNLIVFHSRMLDSVEKLLVETSDLSTFCFHLRIFEKMFAMTLEESAMLRYAIAFPLICAHFVHCTHEMCPEEYPHLKNHGLHHCNSFLEELAKQTSNCVLEICAEQRNLSEQLLPKHCATTISKAKNKKTRKQRQTPRKGEPERDKPGAESHRKNRSIVTNMDKLHLNLTELALTMNHVYSFSVFEHTIFPSEYLSSHLEARLNRAIVWLAGYNATTQEIVRPSELLAGVKAYIGFIQSLAQFLGADASRVIRNALLQQTQPLDSCGEQTITTLYTNWYLESLLRQASSGTIILSPAMQAFVSLPREGEQNFSAEEFSDISEMRALAELLGPYGMKFLSENLMWHVTSQIVELKKLVVENMDILVQIRSNFSKPDLMASLLPQLTGAENVLKRMTIIGVILSFRAMAQEGLREVFSSHCPFLMGPIECLKEFVTPDTDIKVTLSIFELASAAGVGCDIDPALVAAIANLKADTSSPEEEYKVACLLLIFLAVSLPLLATDPSSFYSIEKDGYNNNIHCLTKAIIQVSAALFTLYNKNIETHLKEFLVVASVSLLQLGQETDKLKTRNRESISLLMRLVVEESSFLTLDMLESCFPYVLLRNAYREVSRAFHLN

SEQ ID NO: 57 - DNA, 3010 bp, Homo sapiens
agagaagttggagctttttcgttgtttttttttttttccctcctgtgacatgtgctttagttgcagtggaaaggaaatgtgtcatctgtggtttggttttaaaagtggaaaactagctgcacatatccttttttactgcagatttactttaaggctcatattctccaagtctattctgctttaaaaagaagacaagaaaagaagtggtttatcaaaatcacgttataatcagattttgaccaagcattttgtaagtatacaaatgtcagccaatgacatataacaaccatttcttataaaaccttgatgttcaaaagcctgactagcagtggcatccatgttgcttaggagttggtttggaaacaaagactttcaggccctacctatactagctagattgccaagcatgcccacggacatggaacacacaggacattacctacatcttgcctttctgatgacaacagttttttctttgtctcctggaacaaaagcaaactatacccgtctgtgggctaacagtacttcttcctgggattcagttattcaaaacaagacaggcagaaaccaaaatgaaaacattaacacaaaccctataactcctgaagtagattataaaggtaattctacaaacatgcctgaaacatctcacatcgtagctttaacttctaaatctgaacaggagctttatataccttctgtcgtcagcaacagtccttcaacagtacagagcattgaaaacacaagcaaaagtcatggtgaaattttcaaaaaggatgtctgtgcggaaaacaacaacaacatggctatgctaatttgcttaattataattgcagtgctttttcttatctgtacctttctatttctatcaactgtggttttggcaaacaaagtctcttctctcagacgatcaaaacaagtaggcaagcgtcagcctagaagcaatggcgattttctggcaagcggtctatggcccgctgaatcagacacttggaaaagaacaaaacagctcacaggacccaacctagtgatgcaatctactggagtgctcacagctacaagggaaagaaaagatgaagaaggaactgaaaaacttactaacaaacagataggttagtgaagaaaaatgcaaagtagcaatgagaaggcttatggagtaaaaatgaagtcagttggtatttaatcccaaagtgttgttctgattatctaaaatttgacatggtagaccttgcaatttagaatcaagcaggtgagacagggagaagtatgcctgcttaattatttaaactgtgtacttttgttttgacactgaatattttaaaaagcaaataataaaataactaagcatttgaggaaaattttaaggataaattgaggaaactgattaatagagatagcaagggataattaaataaatattccctatgtagcaacagtggttagatgatctttgtctgaatgtaattaaactttgaatagttttagtgtgtccttaaagccaagtatatgctttaacatcaaatggaagtcaaattcctaatgcatagatagagagagctaaactgtgtaatttaatggtatcttccttgctggatgtggcagaatccacaccagcttatcaaccaacacagctaattttagaatagatcctttatctttccatatggcacacgtaagaaagtgtttttctactattaatattaaattaaaacctttacttttgtataataaattaaaactcagaataaacctgtgaccacgtatatttgcattcactttattactttagagaacacattgtaaagatcaataagaaatagagcacaactaaaataaataagatttatagccacaccaataggctaagtgtaaacgcaaagtatgtttcactgtttatgattaataatattcatcttttctataaatactacttactggaacattaacaacaagtaccaaaggttgattaatttttggacttcaaggatgccaagtagcctaatgatttattaggggtgtgtgtgtgtgtgtgtgtgtgtgtgtgtgtgtgttcaaatctggaaaactgcatacttcaggttataatttaacctttaaagaaactggcttcaagtaaaataatgacttacatttaagttgagaacccccccatcttcaattaaatatattacaaaaattggtttgagagactttccaaatatctactgaaattaacacagggctaagatcaggccacatttcaaaaatctcatcccttactgggcatttatttcgggcaatatagtaaccattttaaaaatattttttatatgttttttcccaagtatgactacaatcttactctcccttctaagctagtgattcttaccctggctgcatgtcagaatcacctgaagagtttttaaaaaacaccaatgcctaattcccatgtcttccttctgatgcaactggaatggggtgaactctaagcattggtaatttttacgtaactctcaaggtgataactgctcttggtcatcaaattcaaacgtctagctattattaaaatgagaggaaaaaaataaagcatcatttttattatcaatttattagcaatttgtaaaaaacaaatctattctctaaacgagaaatcataacaatattattccagataaagttaagtgttaacaaagtaaaaaggaaagcatgagaatattcatgccagtcatggtgactgaaatcaggttatcttttgaggggaaaaataacccagattagaaatgaaactgggcagacttcccattctgtgcaaaaattgaaaatttgagattgtgcaccagtacatccaggagtaacacaaagcactccttgaatcaagggtcataaataaacacgtgtcagagaaaattaaaagaaattaatatcatcataaaaataggaaattactttcatattcaacatactggtcaaacattttctcaccagagagcttctaccacaaggatatttaaaagaatatttaaaattcacc

SEQ ID NO: 58 - protein, 259 aa, Homo sapiens
MLLRSWFGNKDFQALPILARLPSMPTDMEHTGHYLHLAFLMTTVFSLSPGTKANYTRLWANSTSSWDSVIQNKTGRNQNENINTNPITPEVDYKGNSTNMPETSHIVALTSKSEQELYIPSVVSNSPSTVQSIENTSKSHGEIFKKDVCAENNNNMAMLICLIIIAVLFLICTFLFLSTVVLANKVSSLRRSKQVGKRQPRSNGDFLASGLWPAESDTWKRTKQLTGPNLVMQSTGVLTATRERKDEEGTEKLTNKQIG

SEQ ID NO: 59 - DNA, 6595 bp, Homo sapiens
actctatccccgggggcagtttgggaaggagggagtggtagtcgcgggaatgagggagcaagagaaaccctctcaaagtgacgccccaaacaggtccggatttagaattcgaagctaaaggctgttagaaattgggactcctcggcctcctctgcagcccctcctttcccgccccgaagcccgggcggtttgctggctgcctgcttccccgcccccggctcagaggtctctggctggcgggcgccccgtcggccgccggcttcctccttgaaacccgccggcgcacatgaggccgctgcccccgccgcaggcgctggcggccccctcgcggtgcccgtggtgatgccatgccccgccaccacgcgggaggagaggagggcggcgccgccgggctctgggtgaagagcggcgcagcggcggcggcggcgggcggggggcgcttgggcagcggcatgaaggatgtggagtccggccggggcagggtgctgctgaactcggcagccgccaggggcgacggcctgctactgctgggcacccgcgcggccacgctcggtggcggcggcggtggcctgagggagagccgccggggcaagcagggggcccggatgagcctgctggggaagccgctctcttacacgagtagccagagctgccggcgcaacgtcaagtaccggcgggtgcagaactacctgtacaacgtgctggagagaccccgcggctgggcgttcatctaccacgctttcgtttttctccttgtctttggttgcttgattttgtcagtgttttctaccatccctgagcacacaaaattggcctcaagttgcctcttgatcctggagttcgtgatgattgtcgtctttggtttggagttcatcattcgaatctggtctgcgggttgctgttgtcgatatagaggatggcaaggaagactgaggtttgctcgaaagcccttctgtgttatagataccattgttcttatcgcttcaatagcagttgtttctgcaaaaactcagggtaatatttttgccacgtctgcactcagaagtctccgtttcctacagatcctccgcatggtgcgcatggaccgaaggggaggcacttggaaattactgggttcagtggtttatgctcacagcaaggaattaatcacagcttggtacataggatttttggttcttattttttcgtctttccttgtctatctggtggaaaaggatgccaataaagagttttctacatatgcagatgctctctggtggggcacaattacattgacaactattggctatggagacaaaactcccctaacttggctgggaagattgctttctgcaggctttgcactccttggcatttctttctttgcacttcctgccggcattcttggctcaggttttgcattaaaagtacaagaacaacaccgccagaaacactttgagaaaagaaggaacccagctgccaacctcattcagtgtgtttggcgtagttacgcagctgatgagaaatctgtttccattgcaacctggaagccacacttgaaggccttgcacacctgcagccctaccaagaaagaacaaggggaagcatcaagcagtcagaagctaagttttaaggagcgagtgcgcatggctagccccaggggccagagtattaagagccgacaagcctcagtaggtgacaggaggtccccaagcaccgacatcacagccgagggcagtcccaccaaagtgcagaagagctggagcttcaacgaccgaacccgcttccggccctcgctgcgcctcaaaagttctcagccaaaaccagtgatagatgctgacacagcccttggcactgatgatgtatatgatgaaaaaggatgccagtgtgatgtatcagtggaagacctcaccccaccacttaaaactgtcattcgagctatcagaattatgaaatttcatgttgcaaaacggaagtttaaggaaacattacgtccatatgatgtaaaagatgtcattgaacaatattctgctggtcatctggacatgttgtgtagaattaaaagccttcaaacacgtgttgatcaaattcttggaaaagggcaaatcacatcagataagaagagccgagagaaaataacagcagaacatgagaccacagacgatctcagtatgctcggtcgggtggtcaaggttgaaaaacaggtacagtccatagaatccaagctggactgcctactagacatctatcaacaggtccttcggaaaggctctgcctcagccctcgctttggcttcattccagatcccaccttttgaatgtgaacagacatctgactatcaaagccctgtggatagcaaagatctttcgggttccgcacaaaacagtggctgcttatccagatcaactagtgccaacatctcgagaggcctgcagttcattctgacgccaaatgagttcagtgcccagactttctacgcgcttagccctactatgcacagtcaagcaacacaggtgccaattagtcaaagcgatggctcagcagtggcagccaccaacaccattgcaaaccaaataaatacggcacccaagccagcagccccaacaactttacagatcccacctcctctcccagccatcaagcatctgcccaggccagaaactctgcaccctaaccctgcaggcttacaggaaagcatttctgacgtcaccacctgccttgttgcctccaaggaaaatgttcaggttgcacagtcaaatctcaccaaggaccgttctatgaggaaaagctttgacatgggaggagaaactctgttgtctgtctgtcccatggtgccgaaggacttgggcaaatctttgtctgtgcaaaacctgatcaggtcgaccgaggaactgaatatacaactttcagggagtgagtcaagtggctccagaggcagccaagatttttaccccaaatggagggaatccaaattgtttataactgatgaagaggtgggtcccgaagagacagagacagacacttttgatgccgcaccgcagcctgccagggaagctgcctttgcatcagactctctaaggactggaaggtcacgatcatctcagagcatttgtaaggcaggagaaagtacagatgccctcagcttgcctcatgtcaaactgaaataagttcttcattttctttccaggcatagcagttctttagccatacatatcattgcatgaactatttcgaaagcccttctaaaaagttgaaattgcaagaatcgggaagaacatgaaaggcagtttataagcccgttaccttttaattgcatgaaaatgcatgtttagggatggctaaaattccaaggtgcatcgacattaacccactcatttagtaatgtaccttgagttaaaaagcctgagaaaccaaacacagctaatgctatggggtgtatgaatatgtcaagtttaggtcatttagaagatttgacactgtattttgaaattatgggagtaaacaccttcaaatttcaggcatttctgctttgtgactaaatacaaactacattttcaagattaggccataatgtatatttaaacacaatggctatcaacagctgctaataaggtatcaactaaagcagaattggggaataatagaaatggctgcttatttcaagatatatttgccaacccattcctattcagtcattttattattaatgtaatttgaatgtcaatttgtgtgcttttggtgatttagcgctgtggcaagcaattttgcacatcattttcatgttgttctttatgacaagaatgttcttcaattagaaaatgtgcaaataatgaaattcagggccagtgaggcaaatagactatctgacatatttgactttatgaaaacatattgcctgatggcagaatcaactttataagtggtcaacttctacacaagcgtatgaaatactggtcagtagaacagccattgtgattggactggtttctctgcaatggcgccaaccccaggcttgccaatactgcctatgtaaagggcaagtgtgagaagctattctcatttcgctgacatacaggtaggactatgggggatgggacatttgagtgggactgagataggaaaggcttgaaaagaacccagaaacaccaccaggaagttggcaaagtaaaagaaaatgacttccccctcaaagggcaatgagagggagagaaacaaaccaaaatagaagaactagactttttagaaaatgagtattgctagggaattcaactacctaatcttcccttattcttatatataagcagagaatttttgcaaggtatttattttttaatatgccctgaatgtcttttgctattatgtgtacattttgcatatgaaagtctaaaacgaaacttcctttactttttatactgtagtgaaaattttctattcttcccaagaatgttgtcccaaatctgaaattactggttcaatttcctgatataaacatttacaattagaagctagatagtactggcagagtctgcaaatcagaacacttaaatatatcatggcagcaaaaagaccaagggaaacaaaatgacaaatgtatttatcagaaagcaagcaatgctgactgcttgttagaaacccatctagctatcttaggtcaccagaacttcagccaacgtaatgacattcaaaaaaaaaggacataagagatagcatttcaattcaattaaaccctagccacaggaggactcaagaaaggaagttgtttccttggcagacataaatgctgcctccagaagtacttctccagcagccaagcagaatgagcagggttatcaagtggatgttcaaaggaagaaggaggccctgaactccaccaatcctccccagccctccccaacaggctttctccatcattgactctcccctgcttttcttcttcattaactccttattcattccctgccagtattttgcttctgaacttcaccaggccttaaccagcctccatccccaggtcaaccagttctccgctttacctaaaatgtgcttctcaaccttttagaaccttgtcccttttgataaacatggaaatttttaaagcttcctcttcgcatcccacttggattctaagacaattagaatcatttagaatctttttggctgctggaaatgtatagaagatagaggctaaattttacacttcagttaagacattgtcaatccttttaagcaattgttttcattttcaaaatacagaatgttagtaaattatgaaaatcaatttttcatcttcattcaacctgaagttgtgattcccccttgcaagaatgttgcatacacacacacacacacacacacacacacacacacacacacacacacacacacacacacacacccctccactgacctaaagccagacacctgccgtgactgggcaggctctctcccattattaacagaggaagaggagggaggcagcaactttcaggtagcactgattcttggacatactctgtcctgggtcaaaccccactggcagcaggaattctgaatgtattggggacccctccttaggcctcgttaagtctcaaacacagtacagctcacccagcattgctgacgactgaagattcagaaacaaaacctacacacagcactgaggtcttaatcatagcaaaatgtgataaaccatgttgtgaaaaacttttatacattgaagccatgaccattttgtgtctatcttactctagcacaaaaattgggggatgttaaaagatagttgtgtggaagctataaggttctgtctgtcgtgttactctctgtggaaatgagaggggtctcccatttacactaagcaaatttccattggtcaattttaatgatgtcttgaagcacaatttagctgagcactgagtagccatatgctttctgagtacaagtgtgtctgccttcttcaacatgtagggttgatcaagctaatacttaattgcaaatatcccttgtatgaggttaactaaaaaaattttgctatgtctgatctacatgtttgcattttgttcaactaaattaatatttgtagattgcaagttttgtttaaaataactttattgagtttttaagtcctgatctgttctaaggtgcctttctcacctcccattgattcagtgattctgaagttcttaatttgcaagtaaaataagtctactagagaggaggaaatcaggcacaaattgaccaattctcatgccatttgcaaagcaaaactgtaaggatgatgaaacctggctaactaaattaatggatcatttcactaaatcagatagaggaaatatcataaatattaacttgtctccctagaagctgagatttttcgccttaaatgacatggttgtgtttttgtaagagaaacttaatctaatctaataatgtgcatttaagtaagcagttctaagtcatgtatgacaatgcaattgtctgtttcctgaaaacaaataaatcgggaacaccatatccatttcaagctatcattaaagtgtaatttcctttgctctcttttactgggattatttgttttaaagtaaaacattaaaaagatgtctataaaaaaaaaaaaaaa

SEQ ID NO: 60 - protein, 932 aa, Homo sapiens
MPRHHAGGEEGGAAGLWVKSGAAAAAAGGGRLGSGMKDVESGRGRVLLNSAAARGDGLLLLGTRAATLGGGGGGLRESRRGKQGARMSLLGKPLSYTSSQSCRRNVKYRRVQNYLYNVLERPRGWAFIYHAFVFLLVFGCLILSVFSTIPEHTKLASSCLLILEFVMIVVFGLEFIIRIWSAGCCCRYRGWQGRLRFARKPFCVIDTIVLIASIAVVSAKTQGNIFATSALRSLRFLQILRMVRMDRRGGTWKLLGSVVYAHSKELITAWYIGFLVLIFSSFLVYLVEKDANKEFSTYADALWWGTITLTTIGYGDKTPLTWLGRLLSAGFALLGISFFALPAGILGSGFALKVQEQHRQKHFEKRRNPAANLIQCVWRSYAADEKSVSIATWKPHLKALHTCSPTKKEQGEASSSQKLSFKERVRMASPRGQSIKSRQASVGDRRSPSTDITAEGSPTKVQKSWSFNDRTRFRPSLRLKSSQPKPVIDADTALGTDDVYDEKGCQCDVSVEDLTPPLKTVIRAIRIMKFHVAKRKFKETLRPYDVKDVIEQYSAGHLDMLCRIKSLQTRVDQILGKGQITSDKKSREKITAEHETTDDLSMLGRVVKVEKQVQSIESKLDCLLDIYQQVLRKGSASALALASFQIPPFECEQTSDYQSPVDSKDLSGSAQNSGCLSRSTSANISRGLQFILTPNEFSAQTFYALSPTMHSQATQVPISQSDGSAVAATNTIANQINTAPKPAAPTTLQIPPPLPAIKHLPRPETLHPNPAGLQESISDVTTCLVASKENVQVAQSNLTKDRSMRKSFDMGGETLLSVCPMVPKDLGKSLSVQNLIRSTEELNIQLSGSESSGSRGSQDFYPKWRESKLFITDEEVGPEETETDTFDAAPQPAREAAFASDSLRTGRSRSSQSICKAGESTDALSLPHVKLK

SEQ ID NO: 61 - DNA, 2504 bp, Homo sapiens
gggacccactatcttgtggtttctgtcaagttcctgattttcatccgtagttgaagatgagcaagaactctgtaacagtgttaccttggagcctacaatgagaggtatttcaaaatgagtgaagcatgactctcacagatgaaggcctagacgcaggatctttaatgaaaaaacacttgggccacttcaagacgacaaacgctcactgggcaaaacaccttcactgaaaagagacctcatattatgcaaaaaaaatcttaaaaggcctctgccttcagaagttacaagatgatcaattcaacctccacacagcctccagatgaatcctgctctcagaacctcctgatcactcagcagatcattcctgtgctgtactgtatggtcttcattgcaggaatcctactcaatggagtgtcaggatggatattcttttacgtgcccagctctaagagtttcatcatctatctcaagaacattgttattgctgactttgtgatgagcctgacttttcctttcaagatccttggtgactcaggccttggtccctggcagctgaacgtgtttgtgtgcagggtctctgccgtgctcttctacgtcaacatgtacgtcagcattgtgttctttgggctcatcagctttgacagatattataaaattgtaaagcctctttggacttctttcatccagtcagtgagttacagcaaacttctgtcagtgatagtatggatgctcatgctcctccttgctgttccaaatattattctcaccaaccagagtgttagggaggttacacaaataaaatgtatagaactgaaaagtgaactgggacggaagtggcacaaagcatcaaactacatcttcgtggccatcttctggattgtgtttcttttgttaatcgttttctatactgctatcacaaagaaaatctttaagtcccaccttaagtcaagtcggaattccacttcggtcaaaaagaaatctagccgcaacatattcagcatcgtgtttgtgttttttgtctgttttgtaccttaccatattgccagaatcccctacacaaagagtcagaccgaagctcattacagctgccagtcaaaagaaatcttgcggtatatgaaagaattcactctgctactatctgctgcaaatgtatgcttggaccctattatttatttctttctatgccagccgtttagggaaatcttatgtaagaaattgcacattccattaaaagctcagaatgacctagacatttccagaatcaaaagaggaaatacaacacttgaaagcacagatactttgtgagttcctaccctcttccaaagaaagaccacgtgtgcatgttgtcatcttcaattacataacagaaatcaataagatatgtgccctcatcataaatatcatctctagcactgccatccaatttagttcaataaaattcaaatataagtttccatgcttttttgtaacatcaaagaaaacatacccatcagtaatttctctaatactgacctttctattctctattaataaaaaattaatacatacaattattcaattctattatattaaaataagttaaagtttataaccactagtctggtcagttaatgtagaaatttaaatagtaaataaaacacaacataatcaaagacaactcactcaggcatcttctttctctaaataccagaatctagtatgtaattgttttcaacactgtccttaaagactaacttgaaagcaggcacagtttgatgaagggctagagagctgtttgcaataaaaagtcaggtttttttcctgatttgaagaagcaggaaaagctgacacccagacaatcacttaagaaaccccttattgatgtatttcatggcactgcaaaggaagaggaatattaattgtatacttagcaagaaaattttttttttctgatagcactttgaggatattagatacatgctaaatatgttttctacaaagacttacgtcatttaatgagcctggggttctggtgttagaatatttttaagtaggctttactgagagaaactaaatattggcatacgttatcagcaacttcccctgttcaatagtatgggaaaaataagatgactgggaaaaagacacacccacaccgtagaacatatattaatctactggcgaatgggaaaggagaccattttcttagaaagcaaataaacttgatttttttaaatctaaaatttacattaatgagtgcaaaataacacataaaatgaaaattcacacatcacatttttctggaaaacagacggattttacttctggagacatggcatacggttactgacttatgagctaccaaaactaaattctttctctgctattaactggctagaagacattcatctatttttcaaatgttctttcaaaacatttttataagtaatgtttgtatctatttcatgctttactgtctatatactaataaagaaatgttttaatactgaaaaaaaaaaaaaaaa

SEQ ID NO: 62 - protein, 338 aa, Homo sapiens
MINSTSTQPPDESCSQNLLITQQIIPVLYCMVFIAGILLNGVSGWIFFYVPSSKSFIIYLKNIVIADFVMSLTFPFKILGDSGLGPWQLNVFVCRVSAVLFYVNMYVSIVFFGLISFDRYYKIVKPLWTSFIQSVSYSKLLSVIVWMLMLLLAVPNIILTNQSVREVTQIKCIELKSELGRKWHKASNYIFVAIFWIVFLLLIVFYTAITKKIFKSHLKSSRNSTSVKKKSSRNIFSIVFVFFVCFVPYHIARIPYTKSQTEAHYSCQSKEILRYMKEFTLLLSAANVCLDPIIYFFLCQPFREILCKKLHIPLKAQNDLDISRIKRGNTTLESTDTL

SEQ ID NO: 63 - DNA, 3178 bp, Homo sapiens
gagaccagacaggatctcttcaagagcagagtcaagagcctggagggcgtttcaagagccgtggagtgcagtgaattagagaaccaaatcagaagcagaagtgggccctagtgaaggtatccatttttcagctatattaatcttttaaaacaaagaaaatggatttcttaaattcatctgatcaaaacttgacctcagaggaactgttaaacagaatgccatccaaaattctggtgtccctcactctgtctgggctggcactgatgacaacaactatcaactcccttgtgatcgctgcaattattgtgacccggaagctgcaccatccagccaattatttaatttgttcccttgcagtcacagattttcttgtggctgtcctggtgatgcccttcagcattgtgtatattgtgagagagagctggattatggggcaagtggtctgtgacatttggctgagtgttgacattacctgctgcacgtgctccatcttgcatctctcagctatagctttggatcggtatcgagcaatcacagatgctgttgagtatgccaggaaaaggactccaaagcatgctggcattatgattacaatagtttggattatatctgtttttatctctatgcctcctctattctggaggcaccaaggaactagcagagatgatgaatgcatcatcaagcacgaccacattgtttccaccatttactcaacatttggagctttctacatcccactggcattgattttgatcctttactacaaaatatatagagcagcaaagacattataccacaagagacaagcaagtaggattgcaaaggaggaggtgaatggccaagtccttttggagagtggtgagaaaagcactaaatcagtttccacatcctatgtactagaaaagtctttatctgacccatcaacagactttgataaaattcatagcacagtgagaagtctcaggtctgaattcaagcatgagaaatcttggagaaggcaaaagatctcaggtacaagagaacggaaagcagccactaccctgggattaatcttgggtgcatttgtaatatgttggcttcctttttttgtaaaagaattagttgttaatgtctgtgacaaatgtaaaatttctgaagaaatgtccaattttttggcatggcttgggtatctcaattcccttataaatccactgatttacacaatctttaatgaagacttcaagaaagcattccaaaagcttgtgcgatgtcgatgttagttttaaaaatgtttattattgaaggatgggggtttttgaggggaggaataactagatgaatgccaaataataaaacacttaagcttttagagggaaatacatgaaaactgctaaattgataaggctataatttatattttaatagcaatgtgaatataaaagttattgatcaccactattctagggtattcaaaattagaaaataatttatgtaggttataaacaatattttgcctatgcaatgttcctaaaaagctaactggaaaaaatatatatatatacaatagtaatgacagtgattttccatgtttacatcttacaataattatagaggagttttcaattaacaacatacctccctccataatttctatctagtcctactgttttataatataattctattattttgtataagaaaatataattcaccacaaagtacacatttctcctgtctccattcttgtcccttctccatcttaccctgagcaaaagggagggggaaggagcaactcttacttagtgtgactgcagaaaatgtaaaaaagtcagagcttgaaattgtccttgtgtttaggtagcaaagagtaatcataaagtgggttaggtacagcaaaataattcaatactgaacttgtgcatatttaatgtattatgtttgatataaacttctagaataatattatcttatccttatattatcagcatttgaaatcaaagccttaccttagtaacaataactcaacaaaggggcatgggtgacgttgttataattgctctctgtttacttaggaatcaaatttaaagcactaaatatcatagattactcaccacagttatactcttaacatctttttaaaagtataaaatgtatttcatttctgttaataagctcagttattaactaaattgtctgtggtattttgcacttcagtattttccatacctttgatttcaacattatttcccgtttactagacagaatataatggaaatttttagaactttccctttactttaaaatatttctacttttccaattggtagaaatgaacaggaaaaaagactcatattacactaattaataaatgtacacacatatatatttttgtaattagtcactctactagttcagtgagccaaagcaattccataagtttttcttccatatttataaaaggatttgaaaacaatagaaccatgagtttgagaggattttattttatttgaaccagcaaggtcatagactacctttgggaagacctatcatcaaccaagatcgtttgaaaaacaatatatacctttttttaagttgtacatttatgtgcattgtaaatattccttcctgatggtgtggttaagagtacattacatcaattttatgtatatatagatctgtgacaaattactctcaatctaacaaacatttacagagttcccattttatacaaggcattgagacatatactagatagaagatatacgaaataataaaatacagttttttttcctgaatatgtttacagtctaaaaggagaaacaagaaaaaataaaactataatagaaaagagcaaactaaaatctggcatggaagttgtttacacagttatgatggtgcagaggaaaaactgatcgcatcttgtttagaaaaatcagaaatatttcacaaagaatgtatctagaacacatgtcaaatacacagcactggggcaagaaaaatggaagagcacactccaggttgtgacaacatcaggatacaaactgcaccatgcaagtatttggtggggcatgttcataaatagcaatgagtttggcaactatttagagcaatagaggaaaaggatattaaaagaaaaattgggcatttttgtggctgactttgaacgtcagaaaaaagtctacagtcaattttattgctg

SEQ ID NO: 64 - protein, 366 aa, Homo sapiens
MDFLNSSDQNLTSEELLNRMPSKILVSLTLSGLALMTTTINSLVIAAIIVTRKLHHPANYLICSLAVTDFLVAVLVMPFSIVYIVRESWIMGQVVCDIWLSVDITCCTCSILHLSAIALDRYRAITDAVEYARKRTPKHAGIMITIVWIISVFISMPPLFWRHQGTSRDDECIIKHDHIVSTIYSTFGAFYIPLALILILYYKIYRAAKTLYHKRQASRIAKEEVNGQVLLESGEKSTKSVSTSYVLEKSLSDPSTDFDKIHSTVRSLRSEFKHEKSWRRQKISGTRERKAATTLGLILGAFVICWLPFFVKELVVNVCDKCKISEEMSNFLAWLGYLNSLINPLIYTIFNEDFKKAFQKLVRCRC

SEQ ID NO: 65 - DNA, 1695 bp, Homo sapiens
gaggcacagataaagataagttttactgtcatgctgcttttaacataacagagcaacatcacctaggaaaaaagtttgtaggaggatttttaatccatatatttgtcttatggctagataaagatttctctgaaaaaaagaagcatgtcaggaatctctgggtgcccctttttcctctggggacttctagcattgttgggcttggctttggttatatcactgatcttcaatatttcccactatgtggaaaagcaacgacaagataaaatgtacagctactccagtgaccacaccagggttgatgagtattatattgaagacacaccaatttatggtaacttagatgatatgatttcagaaccaatggatgaaaattgctatgaacaaatgaaagcccgaccagagaaatctgtaaataagatgcaggaagccaccccatctgcacaggcaaccaatgaaacacagatgtgctacgcctcacttgatcacagcgttaaggggaagcgtagaaagcccaggaaacagaatactcatttctcagacaaggatggagatgagcaactacatgcaatagatgccagcgtttctaagaccaccttagtagacagtttctccccagaaagccaggcagtagaggaaaacattcatgatgatcccatcagactgtttggattgatccgtgctaagagagaacctataaactagctggaccatgatctagttcaatgatttggctcctattgaagatggcttctaagaaaacaagatgcacagaggacacagaaggacttggcagcagggtgatgacctgatcatttgttgatgggatggtggcttacctcttattcacagcttacacttatgcatgccaaatgtaaggccatgaaaatcagtatttcaaataacttaaaaaatgctttactactaaaatgtaaaaaattaatgtgctcacctcggcagcacatatactaaaaattaataagacccagcttgaaaattgagcctgataacaagattacaaattcacaatacctaatacttagggaaatataaaaatttaagcatgaatgcgttctggaacacgttagaagaaaaataaaagccaatgagtttttttttaattctcctttctcaccaatgggcaatagcccataattgaaataaatttctgattgaaaggtataggaaacattaaaatgcattactaagagaagtaatataattttcttacaaagtatttttcccaaagatagctttactatttcaaaaattgtcaaattaatgcatgctccttacaacaaacaaatatcaaaaagagtttaggaattctactagccagagatagtcacttggagaaactttctatatatccttctaaatatttttctgggcatgcttatgtatgtacatcagttgtttctttttattttgaaccaaaaatgtggtttcttttgtacacattacttaaactttctttccagtcaacaatatattgtggatttattttcactgttatatttaactatatataaatacgcatatattgtaattttaatgtctgcttagcaccccactgataaccaaatcacagtttatttaaataattttaatgacttttcaaaaacaatttattgatgcaaaaagcaaggttgagatgacaatgtttctttcaataattaaaaaatactgcttcac

SEQ ID NO: 66 - protein, 186 aa, Homo sapiens
MSGISGCPFFLWGLLALLGLALVISLIFNISHYVEKQRQDKMYSYSSDHTRVDEYYIEDTPIYGNLDDMISEPMDENCYEQMKARPEKSVNKMQEATPSAQATNETQMCYASLDHSVKGKRRKPRKQNTHFSDKDGDEQLHAIDASVSKTTLVDSFSPESQAVEENIHDDPIRLFGLIRAKREPIN

SEQ ID NO: 67 - DNA, 1801 bp, Homo sapiens
atgctcagtcacagggtgacagagaaaaaaaaagtcaccaccataaaaggaggtctgcacagcctctcttaaaacaacatgccacagttaaaacttacttcagtttggacaactactcacagctactacacagagacccgaacgagtcactgatatacacctggaccaccaccaatggatatacaaatggcaaacaattttactccgccctctgcaactcctcagggaaatgactgtgacctctatgcacatcacagcacggccaggatagtaatgcctctgcattacagcctcgtcttcatcattgggctcgtgggaaacttactagccttggtcgtcattgttcaaaacaggaaaaaaatcaactctaccaccctctattcaacaaatttggtgatttctgatatactttttaccaccgctttgcctacacgaatagcctactatgcaatgggctttgactggagaatcggagatgccttgtgtaggataactgcgctagtgttttacatcaacacatatgcaggtgtgaactttatgacctgcctgagtattgaccgcttcattgctgtggtgcaccctctacgctacaacaagataaaaaggattgaacatgcaaaaggcgtgtgcatatttgtctggattctagtatttgctcagacactcccactcctcatcaaccctatgtcaaagcaggaggctgaaaggattacatgcatggagtatccaaactttgaagaaactaaatctcttccctggattctgcttggggcatgtttcataggatatgtacttccacttataatcattctcatctgctattctcagatctgctgcaaactcttcagaactgccaaacaaaacccactcactgagaaatctggtgtaaacaaaaaggctctcaacacaattattcttattattgttgtgtttgttctctgtttcacaccttaccatgttgcaattattcaacatatgattaagaagcttcgtttctctaatttcctggaatgtagccaaagacattcgttccagatttctctgcactttacagtatgcctgatgaacttcaattgctgcatggacccttttatctacttctttgcatgtaaagggtataagagaaaggttatgaggatgctgaaacggcaagtcagtgtatcgatttctagtgctgtgaagtcagcccctgaagaaaattcacgtgaaatgacagaaacgcagatgatgatacattccaagtcttcaaatggaaagtgaaatggattgtattttggtttatagtgacgtaaactgtatgacaaactttgcaggacttcccttataaagcaaaataattgttcagcttccaattagtattcttttatatttctttcattgggcactttcccatctccaactcggaagtaagcccaagagaacaacataaagcaaacaacataaagcacaataaaaatgcaaataaatatttcatttttatttgtaaacgaatacaccaaaaggaggcgctcttaataactcccaatgtaaaaagttttgttttaataaaaaatttaattattatttcttgccaacaaatggctagaaaggactgaatagattatatattgccagatgttaatactgtaacatactttttaaataacatatttcttaaatccaaatttctctcaatgttagatttaattccctcaataacaccaatgttttgttttgtttcgttctgggtcataaaactttgttaaggaactcttttggaataaagagcaggatgctgcaaagttaaaaaaaaaaaaaaaaa

SEQ ID NO: 68 - protein, 361 aa, Homo sapiens [sequence omitted]

SEQ ID NO: 69 - DNA, 1041 bp, Homo sapiens
atgtacagatttacagattttgatgtatcaaacatttcaatttacctgaatcatgtccttttctatactacccagcaggcaggtgacctagaacacatggagacaagaaattactctgccatgactgaattctttctggtggggctttcccaatatccagagctccagctttttctgttcctgctctgcctcatcatgtacatgataatcctcctgggaaatagcctcctcattatcatcaccatcttggattctcgcctccatactcccatgtatttctttcttggaaacctctcattcttggacatctgttacacatcctcatccattcctccaatgcttattatatttatgtctgagagaaaatccatctccttcattggctgtgctctgcagatggttgtgtcccttggcttgggctccactgagtgtgtcctcctggctgtgatggcctatgaccactatgtggccatctgcaacccactgaggtactccatcatcatgaacggagtgctgtatgtgcaaatggctgcatggtcctggatcataggctgtctgacctccctattgcaaacagttctgacaatgatgttgcctttctgtgggaataatgtcattgatcatattacctgtgaaattttggcccttctaaaacttgtttgttcagatatcaccatcaatgtgcttatcatgacagtgacaaatattgtttcactggtgattcttctactgttaattttcatctcctatgtgtttattctctcttccatcctgagaattaattgtgctgagggaagaaagaaagccttctctacctgttcagcgcactcgattgtggtcatcttattctacggttcagccctttttatgtacatgaaacccaagtcaaagaacactaatacatctgatgagattattgggctgtcttatggagtggtaagcccaatgttaaatcccatcatctatagcctcaggaataaagaggtcaaagaggctgtaaagaaagtcctgagcagacatctgcatttattgaaaatgtga

SEQ ID NO: 70 - protein, 346 aa, Homo sapiens
MYRFTDFDVSNISIYLNHVLFYTTQQAGDLEHMETRNYSAMTEFFLVGLSQYPELQLFLFLLCLIMYMIILLGNSLLIIITILDSRLHTPMYFFLGNLSFLDICYTSSSIPPMLIIFMSERKSISFIGCALQMVVSLGLGSTECVLLAVMAYDHYVAICNPLRYSIIMNGVLYVQMAAWSWIIGCLTSLLQTVLTMMLPFCGNNVIDHITCEILALLKLVCSDITINVLIMTVTNIVSLVILLLLIFISYVFILSSILRINCAEGRKKAFSTCSAHSIVVILFYGSALFMYMKPKSKNTNTSDEIIGLSYGVVSPMLNPIIYSLRNKEVKEAVKKVLSRHLHLLKM

SEQ ID NO: 71 - DNA, 1869 bp, Homo sapiens
ggagtttgagtgagagatatagggaaggaagggaagtaagcagtcacagacgctggcggccaccagaagtttgagcctctttggtagcaggaggctggaagaaaggacagaagtagctctggctgtgatggggatcttactgggcctgctactcctggggcacctaacagtggacacttatggccgtcccatcctggaagtgccagagagtgtaacaggaccttggaaaggggatgtgaatcttccctgcacctatgaccccctgcaaggctacacccaagtcttggtgaagtggctggtacaacgtggctcagaccctgtcaccatctttctacgtgactcttctggagaccatatccagcaggcaaagtaccagggccgcctgcatgtgagccacaaggttccaggagatgtatccctccaattgagcaccctggagatggatgaccggagccactacacgtgtgaagtcacctggcagactcctgatggcaaccaagtcgtgagagataagattactgagctccgtgtccagaaactctctgtctccaagcccacagtgacaactggcagcggttatggcttcacggtgccccagggaatgaggattagccttcaatgccaggctcggggttctcctcccatcagttatatttggtataagcaacagactaataaccaggaacccatcaaagtagcaaccctaagtaccttactcttcaagcctgcggtgatagccgactcaggctcctatttctgcactgccaagggccaggttggctctgagcagcacagcgacattgtgaagtttgtggtcaaagactcctcaaagctactcaagaccaagactgaggcacctacaaccatgacataccccttgaaagcaacatctacagtgaagcagtcctgggactggaccactgacatggatggctaccttggagagaccagtgctgggccaggaaagagcctgcctgtctttgccatcatcctcatcatctccttgtgctgtatggtggtttttaccatggcctatatcatgctctgtcggaagacatcccaacaagagcatgtctacgaagcagccagggcacatgccagagaggccaacgactctggagaaaccatgagggtggccatcttcgcaagtggctgctccagtgatgagccaacttcccagaatctgggcaacaactactctgatgagccctgcataggacaggagtaccagatcatcgcccagatcaatggcaactacgcccgcctgctggacacagttcctctggattatgagtttctggccactgagggcaaaagtgtctgttaaaaatgccccattaggccaggatctgctgacataattgcctagtcagtccttgccttctgcatggccttcttccctgctacctctcttcctggatagcccaaagtgtccgcctaccaacactggagccgctgggagtcactggctttgccctggaatttgccagatgcatctcaagtaagccagctgctggatttggctctgggcccttctagtatctctgccgggggcttctggtactcctctctaaataccagagggaagatgcccatagcactaggacttggtcatcatgcctacagacactattcaactttggcatcttgccaccagaagacccgagggaggctcagctctgccagctcagaggaccagctatatccaggatcatttctctttcttcagggccagacagcttttaattgaaattgttatttcacaggccagggttcagttctgctcctccactataagtctaatgttctgactctctcctggtgctcaataaatatctaatcataacagcaaaaaaaaaaaaaaaaaaa

SEQ ID NO: 72 - protein, 399 aa, Homo sapiens
MGILLGLLLLGHLTVDTYGRPILEVPESVTGPWKGDVNLPCTYDPLQGYTQVLVKWLVQRGSDPVTIFLRDSSGDHIQQAKYQGRLHVSHKVPGDVSLQLSTLEMDDRSHYTCEVTWQTPDGNQVVRDKITELRVQKLSVSKPTVTTGSGYGFTVPQGMRISLQCQARGSPPISYIWYKQQTNNQEPIKVATLSTLLFKPAVIADSGSYFCTAKGQVGSEQHSDIVKFVVKDSSKLLKTKTEAPTTMTYPLKATSTVKQSWDWTTDMDGYLGETSAGPGKSLPVFAIILIISLCCMVVFTMAYIMLCRKTSQQEHVYEAARAHAREANDSGETMRVAIFASGCSSDEPTSQNLGNNYSDEPCIGQEYQIIAQINGNYARLLDTVPLDYEFLATEGKSVC

SEQ ID NO: 73 - DNA, 900 bp, Homo sapiens
atgcttcggttattctatttctctgctattattgcctcagttattttaaattttgtaggaatcattatgaatctgtttattacagtggtcaattgcaaaacttgggtcaaaagccatagaatctcctcttctgataggattctgttcagcctgggcatcaccaggtttcttatgctgggactatttctggtgaacaccatctacttcgtctcttcaaatacggaaaggtcagtctacctgtctgctttttttgtgttgtgtttcatgtttttggactcgagcagtgtctggtttgtgaccttgctcaatatcttgtactgtgtgaagattactaacttccaacactcagtgtttctcctgctgaagcggaatatctccccaaagatccccaggctgctgctggcctgtgtgctgatttctgctttcaccacttgcctgtacatcacgcttagccaggcatcaccttttcctgaacttgtgactacgagaaataacacatcatttaatatcagtgagggcatcttgtctttagtggtttctttggtcttgagctcatctctccagttcatcattaatgtgacttctgcttccttgctaatacactccttgaggagacatatacagaagatgcagaaaaatgccactggtttctggaatccccagacggaagctcatgtaggtgctatgaagctgatggtctatttcctcatcctctacattccatattcagttgctaccctggtccagtatctccccttttatgcagggatggatatggggaccaaatccatttgtctgatttttgccaccctttactctccaggacattctgttctcattattatcacacatcctaaactgaaaacaacagcaaagaagattctttgtttcaaaaaatag

SEQ ID NO: 74 - protein, 299 aa, Homo sapiens
MLRLFYFSAIIASVILNFVGIIMNLFITVVNCKTWVKSHRISSSDRILFSLGITRFLMLGLFLVNTIYFVSSNTERSVYLSAFFVLCFMFLDSSSVWFVTLLNILYCVKITNFQHSVFLLLKRNISPKIPRLLLACVLISAFTTCLYITLSQASPFPELVTTRNNTSFNISEGILSLVVSLVLSSSLQFIINVTSASLLIHSLRRHIQKMQKNATGFWNPQTEAHVGAMKLMVYFLILYIPYSVATLVQYLPFYAGMDMGTKSICLIFATLYSPGHSVLIIITHPKLKTTAKKILCFKK

SEQ ID NO: 75 - DNA, 1676 bp, Homo sapiens
aagtcataaggtgaaaaagcctatttcagagagcacttcctgaaagagacaaagcagcaattaaagtcagcccagcaccaactccgacgccaagcgttacactggaaactactttttaaagcaacaaaagagtctaaaacaaaatacaacatttcttaaatacactgtttccagaaagagctattttaacagaagcaactcaaagatatcccttcgacagaagtggaagtgctgaaaaatgctcatctctcacacagacttttgatggacaggaggtgctgctttctgtgaaccactgaagtagagcagctgaaatcacaaaacctggaagacttggctttacgtactcccaattgtgcactagaaaacagctcatctattgctctaacagtctagttcttgatctgctgaccatgacacaaaacattgctgtttctcaacctatgataatttaaagagaacataagtttctaagtatcatgcctaccaacaagctgtaaaatgatcaccctgaacaatcaagatcaacctgtcccttttaacagctcacatccagatgaatacaaaattgcagcccttgtcttctatagctgtatcttcataattggattatttgttaacatcactgcattatgggttttcagttgtaccaccaagaagagaaccacggtaaccatctatatgatgaatgtggcattagtggacttgatatttataatgactttaccctttcgaatgttttattatgcaaaagatgaatggccatttggagagtacttctgccagattcttggagctctcacagtgttttacccaagcattgctttatggcttcttgcctttattagtgctgacagatacatggccattgtacagccgaagtacgccaaagaacttaaaaacacgtgcaaagccgtgctggcgtgtgtgggagtctggataatgaccctgaccacgaccacccctctgctactgctctataaagacccagataaagactccactcccgccacctgcctcaagatttctgacatcatctatctaaaagctgtgaacgtgctgaacctcactcgactgacattttttttcttgattcctttgttcatcatgattgggtgctacttggtcattattcataatctccttcacggcaggacgtctaagctgaaacccaaagtcaaggagaagtccataaggatcatcatcacgctgctggtgcaggtgctcgtctgctttatgcccttccacatctgtttcgctttcctgatgctgggaacgggggagaacagttacaatccctggggagcctttaccaccttcctcatgaacctcagcacgtgtctggatgtgattctctactacatcgtttcaaaacaatttcaggctcgagtcattagtgtcatgctataccgtaattaccttcgaagcatgcgcagaaaaagtttccgatctggtagtctacggtcactaagcaatataaacagtgaaatgttatgaataataaggttctttcatttcaatcccatcaaaattcacttcactaactactctggcgtcaatggatattctgtataatactatcaagtcccttttctcttgaaaaaataaattcattatcttcattttaaaaacttatataaaacatttttgtgaattattcaaaaaaaaaaaaaaaa

SEQ ID NO: 76 - protein, 331 aa, Homo sapiens
MITLNNQDQPVPFNSSHPDEYKIAALVFYSCIFIIGLFVNITALWVFSCTTKKRTTVTIYMMNVALVDLIFIMTLPFRMFYYAKDEWPFGEYFCQILGALTVFYPSIALWLLAFISADRYMAIVQPKYAKELKNTCKAVLACVGVWIMTLTTTTPLLLLYKDPDKDSTPATCLKISDIIYLKAVNVLNLTRLTFFFLIPLFIMIGCYLVIIHNLLHGRTSKLKPKVKEKSIRIIITLLVQVLVCFMPFHICFAFLMLGTGENSYNPWGAFTTFLMNLSTCLDVILYYIVSKQFQARVISVMLYRNYLRSMRRKSFRSGSLRSLSNINSEML

SEQ ID NO: 77 - DNA, 1101 bp, Homo sapiens
tcagtgaggagattctatgtatcaacagaaagaacaaagatcagggctgcctaattgctgacatgatgggactcaccgagggggtgttcctgattctgtctggcactcagttcacactgggaattctggtcaattgtttcattgagttggtcaatggtagcagctggttcaagaccaagagaatgtctttgtctgacttcatcatcaccaccctggcactcttgaggatcattctgctgtgtattatcttgactgatagttttttaatagaattctctcccaacacacatgattcagggataataatgcaaattattgatgtttcctggacatttacaaaccatctgagcatttggcttgccacctgtcttggtgtcctctactgcctgaaaatcgccagtttctctcaccccacattcctctggctcaagtggagagtttctagggtgatggtatggatgctgttgggtgcactgctcttatcctgtggtagtaccgcatctctgatcaatgagtttaagctctattctgtctttaggggaattgaggccaccaggaatgtgactgaacacttcagaaagaagaggagtgagtattatctgatccatgttcttgggactctgtggtacctgcctcccttaattgtgtccctggcctcctactctttgctcatcttctccctggggaggcacacacggcagatgctgcaaaatgggacaagctccagagatccaaccactgaggcccacaagagggccatcagaatcatcctttccttcttctttctcttcttactttactttcttgctttcttaattgcatcatttggtaatttcctaccaaaaaccaagatggctaagatgattggcgaagtaatgacaatgttttatcctgctggccactcatttattctcattctggggaacagtaagctgaagcagacatttgtagtgatgctccggtgtgagtctggtcatctgaagcctggatccaagggacccattttctcttagagtaacagagggcatggggtggagcccttgagccttttggcctggctcaagactacaggactcttcctgaccttcctatgttaccagt

SEQ ID NO: 78 - protein, 316 aa, Homo sapiens
MMGLTEGVFLILSGTQFTLGILVNCFIELVNGSSWFKTKRMSLSDFIITTLALLRIILLCIILTDSFLIEFSPNTHDSGIIMQIIDVSWTFTNHLSIWLATCLGVLYCLKIASFSHPTFLWLKWRVSRVMVWMLLGALLLSCGSTASLINEFKLYSVFRGIEATRNVTEHFRKKRSEYYLIHVLGTLWYLPPLIVSLASYSLLIFSLGRHTRQMLQNGTSSRDPTTEAHKRAIRIILSFFFLFLLYFLAFLIASFGNFLPKTKMAKMIGEVMTMFYPAGHSFILILGNSKLKQTFVVMLRCESGHLKPGSKGPIFS

SEQ ID NO: 79 - DNA, 7860 bp, Homo sapiens
agaatcttctgtaggcctttctcttgccttcttttattcacaactgatgacactgcatatcttcccctgttcttattgggagaaggccttgtgtgtcaccaagaggttctcagaagggacctgtcagtttttggttaaaagaacccggaaagagaaggactatgggggaactgatggcgttcctgttacctctcatcattgtgttaatggtgaagcacagcgattcccggacgcactctctgagatattttcgcctgggcgtttcggatcccatccatggggtccctgaatttatttcggttgggtacgtggactcgcaccctatcaccacatatgacagtgtcactcggcagaaggagccacgggccccatggatggcagagaacctcgcgcctgatcactgggagaggtacactcagctgctgaggggctggcagcagatgttcaaggtggaactgaagcgcctacagaggcactacaatcactcagggtctcacacttaccagagaatgattggctgtgagctgctggaggatggaagcaccacaggatttctgcagtatgcatatgacgggcaggatttcctgatcttcaataaagacaccctctcctggctggctgtagataatgtggctcacaccatcaagcaggcatgggaggccaatcagcatgagttgctgtatcaaaagaattggctggaagaagaatgtattgcctggctaaagagattcctggagtatgggaaagacaccctacaaagaacagagcccccactggtcagagtaaatcgcaaagaaacttttccaggggttacagctctcttctgcaaagctcatggcttttaccccccagaaatttacatgacatggatgaaaaacggggaagaaattgtccaagaaattgattatggagacattcttcccagtggggatggaacctatcaggcgtgggcatcaattgagcttgatcctcagagcagcaacctttactcctgtcatgtggagcactgcggtgtccacatggttcttcaggtcccccaggaatcagaaactatccctcttgtgatgaaagctgtctctgggtccattgtccttgtcattgtgctggctggagttggtgttctagtctggagaagaaggccccgagagcaaaatggagccatctaccttccaacaccagatcgatgattgcagatccctcttttccagttctccttcctctaggagccatgttatcctctgtcccccatagagtcaagcctagtgcttgaaggtcctgacgacacccacaacatacatgagagtaatgggattgagcatttatggcagcaacagaggagccacaaaatgttctttgttctttggctccaaaaagactgtcagctttcagtctcttttgatggactgttttatcagagttgactttaaatacagcttgtctcatgacacaacgcttccctacattctatttgtcaatgatgatttgcaactagttggagattctcagagcaggaaggaatcttttcaaccagagcaggaactgtcttctgcaatgccttggacttgagcctccagcctccacttgaacaccatgtgaagggaacctcagtacttcataaaatggcctttctcattcatctttcatgggaacatttattgtacaagcgctttgaatatcatgggcaccatgactgtgaccctacaggtaggattggatcactccatgagagtagccggcaggtttctacaatggcctgggaatggactgattatttttatacattttctggcctgagagaaagccaaagtcccctgctgttcacagcaaccctgcctgggagcttggaatcttggtaatctgcccggttggatctatggaggtagtctcaccctttttgtcttttgtgggaaattaagagaaataattatcagacatatcatcacctccagtggaactacagagacctggacccagctgcactattttaatgtaaaaataacagtatggccaggtgcagtggctcacgcctgtaatcccatcactttgagcagccaaggcgggcggatcacgaggtcaggagattaagaccatcctggccaatatggtgaaaccctgtctctactaaaatacaaaaaattagctgggcatggtgttgcgtgcctgtagtcccagctacttgggaggctgagacaggggaattgcttgaacccgggaggcagagattgcagtgagccgagatcacgccactgcactccagcctggcgacagagtgagactctatctcaaaataataataataataataataataataataataataataacagtatatttggtgtcaggagagggctcaattctcatttctgcctttcctgtgctggctcatggtagctgggcatgacttgccttcctacataggttgtcttcatacatatgcactgggaatcaataaaagcccatggtgagaatgaacatccccttaatgttccttactatccccaacccctgaggcctcacctactgccctgccatgtggagctacttgccctggggctgccagtcacacattcctcggtcctacttctctgaccccgtttgactctgcacctgagccctaatgcttacttcagtgacctgaactttgacaagtggcttttgtcctgcacctcaggtttgacctctgctctcccttgaccttgactgtgacatttgacctttggctttaatcattacagcctcagataaaggtaccttcagcccgggcacagtggctcacgcctgtaatcctagcactttgggaggctgaggcaggcggattccctgagctcaggagttcaagaccagcctgggcaacacggtgaaaccctgtctctactaaaatacaaataattagctgggcatggtggcatgtgcctatagtcccagctacttgggaggctaaggcaggagaatcacttgaatctataaggcagaggtggcagtgagccgagatcacaccactgcactccagcctgggcaacggagcaagactctgtctccaaaaaaaaaaagaaagataccctcagtgtgccaggcctctaagagctcacctgccaggcttcctccttgctccactgtcccatgtaattccatatatgaagctaccactgtacatctctcttttccggtgcctgttgagttgcatagaagcacagttgtgtttattttgtttttagggttgccatgggcaatttccgtgccacttttaagcagtgttgcactgtgaagagaatgtaggcaagtttatttctggaatggtttcttcttacaatcagaatagttaggatgtaatatatttttgggtgggcatttaaagtgaaaaggtacatatttacatagacacaggtgataatgtatctatgtaaatgccttttgattctgcaactgcaggatactctcatcaaagacacagataaaaagcctctgtgtttccaaggccttgccctacacctaacacataatatgtccaaatggatgaagaggaggcaaggacaaggatgtgatgacaaaacattctgttatgcacttgtagcatttatgtttcttcctgggggattttataatactaaaagaatcataatataaagagatgattaaaaaaaaaatactgccgggcacggtggctcatgcctgtaatcccagcattttgggaggccgaggtgggcagatcacctgaggtcgggagttcgagaccagcctgaccaacatggagaaaccctgtctctaccaaacatacaaaattagccggggatggtggcgcatgcctataatcccagctactcgggagtctgaggcagaagaaccgcttgaacccgggaggcagaggttgtggtgagccgagatcgcgccatcgcactctagcctgggcaacaagagtgaaactccatctcaaaaaaataaaaataaaataagtaagtaatacctaaaattctgcaaccttcattttactatagatggttgaagattatattacttcttaattgttttagccttgttattgcttcattacttcatggttgttgagtacagatgctcagtaatcataacctatgaaatatttgacaccatgatctaaacattaaaaacaaataactgtgctattgccacagctatgttttggctttgaattttctttactgaatattttggatcaagaacactagatgagaaacctgttcaactctgttcttttttttttttttaactccactgtatttattacctgtttttgttttttttgtttgtttgtttttgatgtgcatatagaccaagatgtggtaaatttaaatggcagatgtttttgatgtggtacatttaagggagagaaagcagtttaaagagcagggtgaaaaatccaacaagactccatcgagagtttctgagctctcccatcaggggccagtcctcctttcctctctcctcttactcccatgatttccaagttgtgatcctttccttatttctgaggaatgacttggtttctcctcttctttttttggcctgagagaagatgtttttgcacttgtagctatgaggaacagattgtccactagggaggccagctgatcattttctgccagagtcacacagagcagtcacaccttattttgaaaaccactgtctggggtctttgtcctcacatatgcaggtctagtgtccccacaaagtgatcagatggatatataaagtggagtgccaatgtattaatttactgtgagaaacacaattgctaagtgggtcagatatctgtctcagctggtcagtacaccttccagcaggaaaatctacataagaacaactaaatcacaatctgtagagtgcttgatgaccccagaattggtgcaaggggacacattcttgcttgttagcacctgctctctggagtttgctattttctcacacacagtgtattagttcacagaatgttctccaaggaggacagggggctttgcccatagccatgtgctgtgggcagcagagctaggaagaagcacaggcatctcccagcccaggtgtttcccacttaactgcattgcccttttcatcttttttttttccccaatagcttcaggacattcagtacattgtgctttttagaggttgatgattccactgcctgagctgccttcacctctctttctttggaaattgccatctttgagcattgtatgtctctgtaacatctctgcatctccttttcactctggcctccctttctccattgtccttctagcttctggttgccccaaaccccacagactgtgtaacaaaacccaaaacctattggtttaaaacaatacccattttattttctttcatagtttctatgggtcaggaatttggatatggcttgggtaagcagttctggcttctcatggagttggaggcaagtggtggctggaacagaaatggggcagccaggggtggtggccaggcatcagctacatctcctccatgtagtctcaggaactctccatgtaatctctctgtgtgggttgggcttcctcacaacatggtggcctcagggcagtcactgcttacatggcagctagcttccctcagagtgagtatcccaagagatcacagtcaaagtgcatagcatttatataatctaatcttggaagtcacaaaatgtcattcttgtgatactctcattggtgaagaagtcataaaatcctgctcaggttcaaaaagagggtgtatagaacccaacactcaataggaagattgtcagagttacattgtaagaagagcatgtagttgggagatatcattgtggccattttgggaaagatgcaacatgtcacaatgtcatgttctccatcgtctccccgttccaccttgtactggtttccaagggtagtcgtttaaaagtaccacaaaaactgggtggcttggaacaacagaaatttattgtttcacagttctggaggccagaagttcaaaatgaagtgttggcagaaacatgctgcctctaaagggactgggaaaggatctgttccaggcttccctcctatcttctggttgttccttgccttctggctgcgtaactctagtcttcatttggtgttctccctgcatgcatggctttgtgtccaaatttccttttttcatgaggccatcagtcatactggattagggacccactctactactgcaggatgacctcaccttcccaaattacatctgcaacaaccctatttccaaagaaggccacattctgaggtactgggggttataacttcaacatgaattttttggaggaaacaattcaactcctaacacatctctacccaacctctgtaggttccctcaatccaccaaaattttttggctccactggattatctagcagttaggaaaccaagatcattaaatgaattcaccgcaactacagtgagactgactaccttagcttacctctgtgaaaggagttaagccaaaggaatctgtggaattttggagagtttgggagcatttgggggcaggaggcaaatgttcttcctttaaatcacaacacttagttctcttccatttataagactcacccctccatcccaacccctgcaccacaggacaaggaagtgttcttggtcttcaactttcatccctgatggtgaaagcagttgctcctgacctatttgcccaccagcttctcctctggagcctgaggcttctgatgcctgcctggctggttctcagtaagaaggtcaagttcaaccagaggggagatgctgatgcctttcagtacttaaatatgagttcagaccctggggcctggacataagatttggggtcccctggatataagatttctgaaaacactcagactgtggagacccctgctgagggagaagccccaaactgtggcttcaggggaatgcaccaaggctctcattgaggccaccttctccaacaagctcccctcctgcttccccatggctggcatggctgaggaaaaaggacactgagcacagcccgtgcatgagcggcttgccatgcaacaggataaaacccataatgccactcagcaagccttggttgtaaatctagtttgattacatttgtaatcaaatgatggccatttgttctgtttctggtttgtgaaccaactgaagacataagcagggcctcagctaacccacaaatagcacatgtgtgcaaactggaaaaatgaacccttcttctgggaggacgccagcccaggccaggtcacccggcttggccagcagaacacagagtagattttggtcccgtttgttccccagtggggtatctatccttgtgcagggcacaagcctacatggtggctctggtcatatcattagaaaatagacagaaatgggctgcacaccagaatgaatgaattgaattgaaagggaggagtgatggtggaaaaaaaaacaagtcaattcatttagactggtagaaccagaaccactgtgtagtacatccaaacggttaaaattccctggaagatgttacataatcctatcatggtgtttatttatggaaatctattttaaaaattttatgtaatactgcacagtctgtttgcatgatgccttgtacgtagtagcaactcagtaaatactttttgaatgaactagtatagtattttaattagctagtcttcatgtactggtacaaaagaacagtgtcatcttacagctgaagtcatagaggggaaatatcccactcaagatcatataacattccaggtactcaggatgaatggtttgaggactggtctgaattcttcaaaggtttcagctgtattaacattctccatctaataaactttatcttgtcattgca

SEQ ID NO: 80 - protein, 341 aa, Homo sapiens
MGELMAFLLPLIIVLMVKHSDSRTHSLRYFRLGVSDPIHGVPEFISVGYVDSHPITTYDSVTRQKEPRAPWMAENLAPDHWERYTQLLRGWQQMFKVELKRLQRHYNHSGSHTYQRMIGCELLEDGSTTGFLQYAYDGQDFLIFNKDTLSWLAVDNVAHTIKQAWEANQHELLYQKNWLEEECIAWLKRFLEYGKDTLQRTEPPLVRVNRKETFPGVTALFCKAHGFYPPEIYMTWMKNGEEIVQEIDYGDILPSGDGTYQAWASIELDPQSSNLYSCHVEHCGVHMVLQVPQESETIPLVMKAVSGSIVLVIVLAGVGVLVWRRRPREQNGAIYLPTPDR

SEQ ID NO: 81 - DNA, 1938 bp, Homo sapiens
aaccaattgcaccacgaccggatggaagagcccagctgacacaaccaagacgagtctcagtgtctagggaagcttggggttctgctccttttacttcaggcgaacctgaactcagttaatgcaattttgaagcatgccctgaatagattcagtcattatcaagtcaaactaaaaacggtgaaaggttgcgactattaccaaataggaaaaatctgaagacataagaactacacatgaggaatatgtcatttagcactttcactttttgatctccacagaagacaatgagaagtcataccataacaatgacgacaacttcagtcagcagctggccttactcctcccacagaatgcgctttataaccaatcatagcgaccaaccgccacaaaacttctcagcaacaccaaatgttactacctgtcccatggatgaaaaattgctatctactgtgttaaccacatcctactctgttattttcatcgtgggactggttgggaacataatcgccctctatgtatttctgggtattcaccgtaaaagaaattccattcaaatttatctacttaacgtagccattgcagacctcctactcatcttctgcctccctttccgaataatgtatcatattaaccaaaacaagtggacactaggtgtgattctgtgcaaggttgtgggaacactgttttatatgaacatgtacattagcattattttgcttggattcatcagtttggatcgctatataaaaattaatcggtctatacagcaacggaaggcaataacaaccaaacaaagtatttatgtctgttgtatagtatggatgcttgctcttggtggattcctaactatgattattttaacacttaagaaaggagggcataattccacaatgtgtttccattacagagataagcataacgcaaaaggagaagccatttttaacttcattcttgtggtaatgttctggctaattttcttactaataatcctttcatatattaagattgggaagaatctattgaggatttctaaaaggaggtcaaaatttcctaattctggtaaatatgccactacagctcgtaactcctttattgtacttatcatttttactatatgttttgttccctatcatgcctttcgattcatctacatttcttcacagctaaatgtatcatcttgctactggaaagaaattgttcacaaaaccaatgagatcatgctggttctctcatctttcaatagttgcttagatccagtcatgtatttcctgatgtccagtaacattcgcaaaataatgtgccaacttctttttagacgatttcaaggtgaaccaagtaggagtgaaagcacttcagaatttaaaccaggatactccctgcatgatacatctgtggcagtgaaaatacagtctagttctaaaagtacttgaggtaaacatactaaaatgaattatataatgcagcctcttaattctttgaagaactaaaaaattaggaaacaaagttctagcatttacaaaactcagatctcaaagctctgcttgtatttgtgatatttcatttgcttaactgtaaaccatttcaaggtactaacttttaaatctgtatgtaaaatcttttcaaaatacatttttaagctaatactcttaacatagattatgaagttaagtgaaatttatggctctaacagcaaaataattaaagtgccatagtttctcaagtgactaaagtagttattaaaatcaagcacttgatactaatttgaagtgtgtttaaaagtaaatgatttgggaactgacaatgtgtcagaaaatatatgttcatttatcattttaaaatcttgtataatttgccactgtattcatttatgcctaaatctctataacagatgaaaagataattaataaaatcctaattaaaaaatgagaaaaaaaaaaa

SEQ ID NO: 82 - protein, 381 aa, Homo sapiens
MRSHTITMTTTSVSSWPYSSHRMRFITNHSDQPPQNFSATPNVTTCPMDEKLLSTVLTTSYSVIFIVGLVGNIIALYVFLGIHRKRNSIQIYLLNVAIADLLLIFCLPFRIMYHINQNKWTLGVILCKVVGTLFYMNMYISIILLGFISLDRYIKINRSIQQRKAITTKQSIYVCCIVWMLALGGFLTMIILTLKKGGHNSTMCFHYRDKHNAKGEAIFNFILVVMFWLIFLLIILSYIKIGKNLLRISKRRSKFPNSGKYATTARNSFIVLIIFTICFVPYHAFRFIYISSQLNVSSCYWKEIVHKTNEIMLVLSSFNSCLDPVMYFLMSSNIRKIMCQLLFRRFQGEPSRSESTSEFKPGYSLHDTSVAVKIQSSSKST

SEQ ID NO: 83 - DNA, 3171 bp, Homo sapiens
gctgcaccaacttcctgttgggtgctgtggtcccaaggcgcgtgctttgcagcagatgtgtgacctggcgttcccctgagtgctcggaaaatggccttgtctccggtcgttcccgttcaggagcagaattttcccactgtaaaaaaccgagcaagtctggataagtgaggctggctccatgtatccagaatcaacgacgggctccccggctcggctctcgctgcggcagacgggctcccccgggatgatctacagtactcggtatgggagtcccaaaagacagctccagttttacaggaacctgggcaagtctggcctgcgggtctcctgcctgggacttggaacatgggtgaccttcggaggccagatcaccgatgagatggcagagcagctcatgaccttggcctatgataatggcatcaacctcttcgatacagcagaagtctacgcagccggcaaggctgaagtggtactgggaaacatcattaagaagaaaggatggaggcggtccagcctcgtcatcaccaccaagatcttctggggcggaaaggcggagacggagcggggcctgtccaggaagcacataatcgaaggtctgaaagcttccctggagcgactgcagctggagtacgtggatgtggtgtttgccaaccgcccggaccccaacaccccgatggaagagaccgtccgcgccatgacccacgtcatcaaccaggggatggccatgtactggggcacgtcacgctggagctccatggagatcatggaggcctactccgtggcccggcagttcaacctgaccccgcccatctgcgagcaggctgagtaccacatgttccagcgtgagaaagtggaggtgcagctgccggagctgttccacaagataggagtgggcgccatgacctggtcccctctggcctgtggcattgtttctggcaagtacgacagtggcatcccaccctactcaagagcctccttgaagggctaccagtggctgaaggacaagatcctcagtgaggagggccggcgccagcaagccaagctgaaggagctgcaggccatcgccgagcgcctgggctgcaccctgccccagctggccatagcctggtgcctgaggaatgagggagtcagctccgtgctcctgggggcctccaatgcggaccagctcatggagaacattggggcaatacaggtccttccgaaactgtcatcttccattatccacgagattgatagtattttgggcaataaaccctacagcaaaaaggactacagatcctaagccgcccccgcccgcctgctcggacagtttccgttccctcctagtctctgttcgctcgcttaagctgttttgaagccaagtgaagagtgtggtttgcatccaagagaaaacaccacactgtgatgtcatcgggaaatgatctcccaagtcgctgccagacaccacccactgcttcgccggacaatgtcgaagtccagtctgtgccggggaaggcactggttaggaaggatgttcaaacggtcccacccaagcctgtcacctctgctcatcctccaagaccacccagctttctcccagccacagccaagattcccaaagtcaaggcccaaagatttccaaggttcccaaagtcaaggccaggccaaggcctggttgggtccttggggcgggcagggccagcctctcctctgctgagaatccccacttggtgtagggggagaggggaaaggggtctggcccatcgaggggccccttctgccagggccttggttgctggggcagggcctccccactgggggtcttcctccacctcccactttccaagggctccaggaatctggggcctgaccacagattcctctcccatccttttctgctccaacctgccccactgggtcccggcaggggccatgcctaccaagctcgagctggcccttgacccccacccacccccacccttgctggcaggggcagggaccccagggggattgactctgcagtttgggagccacaaaaagcgtagcggtgtgatttctagctcagcctcccaccgtcttcctcctacacaccaatgatgagcctcatgccagtgaggcccggagcgcttgggaggggtcccagtggggcaggcccctctgtctggccacccctctgtcctggccccggaaggccctgtggtcatgtgctcctagctgcacggtggctgctggccacaccacggcaagtggcagcaggggccggccctgtgcacaaggatgcactcctctcggcccctgtagactttctctaaagccgcccgccagcccaggccgctgctctgcaccgagctggtgggcttgggttttgtggagcgcatgcttggaccctttcagtaaggaagggtctttggggttttctgtgcccatgacttgggggctgcacccccacagcacccccacaatgtaggaaaagacctcagggaacctctccctggaaagacgggcagggctggttagcccctcccactgcctgacacctgggacaggctgggcagaggggagagagggcaggacaggccagagtgacgcccccgtgcagcttgggccggagggcaagggatgccagtaagtctgcaggtgcggggtgccacctacaggcccaggcctgtgtcccaagcagtacccaggctttgcagaccacgcggggcagggctccactgaagccacccccacccctcgccagctagctccatagggaagcctgtgtctcctgcccccagggcgcaccctcagtgcaggcacctctgttcccgctttgcccctggaggagccactattccagaaggctccaccctgccgtcctgcgggagcctgctgtccagtcctggccgggccaaggcctgggaaactgtgaaagtcagaaaggccagcggggagaggctggggcgaggggaggagggggatcagcttctgctattaccgaccccccttcatgctgcccctggcgcctagaacccttgcccctcctcatagaccaagtcccgggggtctccactcagtcctgctgcctgcttcaccagaagcagccctgtgagtgtggggtggggaagtcccttcccaacggaggtcccagcctatggccctgggcccaggtgggggtcgcctgcttccttcccggacagggtcctgcag

SEQ ID NO: 84 - protein, 367 aa, Homo sapiens
MYPESTTGSPARLSLRQTGSPGMIYSTRYGSPKRQLQFYRNLGKSGLRVSCLGLGTWVTFGGQITDEMAEQLMTLAYDNGINLFDTAEVYAAGKAEVVLGNIIKKKGWRRSSLVITTKIFWGGKAETERGLSRKHIIEGLKASLERLQLEYVDVVFANRPDPNTPMEETVRAMTHVINQGMAMYWGTSRWSSMEIMEAYSVARQFNLTPPICEQAEYHMFQREKVEVQLPELFHKIGVGAMTWSPLACGIVSGKYDSGIPPYSRASLKGYQWLKDKILSEEGRRQQAKLKELQAIAERLGCTLPQLAIAWCLRNEGVSSVLLGASNADQLMENIGAIQVLPKLSSSIIHEIDSILGNKPYSKKDYRS

SEQ ID NO: 85 - DNA, 3070 bp, Homo sapiens
gagcccagagccagagagcgcgctgggcggtgctgggcacccgcggagtggaacggggctggtggaatgcacagggtcgcagcgcttgggccaccctcggtcagagggcgccgtgtccagcgagcaaacgggcgccccggagccttgctgagaggcagctctgggctttcccagctccgaagtcaatactgagatcccagatgtgtccagagacatcctgaagaggctcgggggtggaggagccttagtgtgtccacaaagggactcctgaaactgactgagagccagtggatttgccagcagtctgagcttctaccgagtcttcccccacctcaatccctgttgctatggagactaccaatggaacggagacctggtatgagagcctgcatgccgtgctgaaggctctaaatgccactcttcacagcaatttgctctgccggccagggccagggctggggccagacaaccagactgaagagaggcgggccagcctacctggccgtgatgacaactcctacatgtacattctctttgtcatgtttctatttgctgtaactgtgggcagcctcatcctgggatacacccgctcccgcaaagtggacaagcgtagtgacccctatcatgtgtatatcaagaaccgtgtgtctatgatctaacacgagagggctgggacggtggaagaccaagacacctggggattgcgtctggggcctccagaactctgctgtggactgcatcaggtctcagtgtccctatctgtaagatcaacaagaaacacggttaagggaggtcgtcactggggtgggagaagaggggctggtagaccgaagccttgtgcataaggattttttcccaggaaaagatagactttataaacagtgggagcccatgaacaaacatataaaagtagcaacagataatgaccaataactggttcagtggctggagtattaggggcctggggattggagaacggagaagaagttgtagcagagggaaatgagacaggaagatgctctggggacacattttttatgtgttatcttcagccatgagaagcagtgatgactatcccatatcacagatatgatttaccaccaccaccctgcccccgctcccgtgaagaaagcagggcaagtgctgtgctgcccatttgggcctgcatagtgccatgattggaacccaggaactctggtctccttgcctagtgcttttcaaaactctgtgctacacaggagtggatccaggcctgaaggtcatacaattctggggactctctttaagaaaaagaattctaaaatatcttacttttgcaaacattatgaaaatatactgccacattaatatgttgctagggcccctgctaggaccttaagaaggagctcatgtgagtcaggaccctgaatgttaggcctcgttagctctatggttcatatgcttcttgaaccaagtcacagggcacttcccagccacattgccaggcaacaggactaaactacctccaaagcaagcagtcttttcagttttgactgagtgatgtgagaaacttcttttcttttcttttctttttttttttttgagacagtctccctatgtcacccaggctgtggtgcagcaacccaatcttggctcactgcaacccccacctcccgggttcaagcaattatcctgcctcagccacctgagtagctgggattacaggttcctgtcaccacacccagttaatttatatatatatatatatatatatatttaagtagagacagggtttcacatgttgcccaggctggtctcgaactcctgtcctcaagttatctgcccattttggtctcccaaagtgctgggattacaagtgtaagccaccacgactatctgagagaagttttctgatgtcatgttgaatctgcttctaaaagactgatactgccaaggtgggcggatcacctgaggtcaggagttcgagaccagcctggccaacatggtgaaaccccatctactaaaaaaatacaaaaattagccagacctggtggcgggtgcccgtattcccagctacttgggaggctgaggcaggagaattgtttgaacccgggaggtggaggttgcagtaagccaagatcacgccactgcactccagcctgggtgacagagcaaggctctgtctcaaaaaaaaacaaaaacaaaaacaaaaaagactgatatcgcacctaaattattattatattaaaagaagcagagtatgagagacaggtacatggtccagtaggaagagaagcagccctgattctaccacttaaggtgatgtatgatcttaggctggacacttctctccctcatccgttttcctcttcaacataatgaaatagacttgaaagtctctaaggctctatcagttctgacattctaggcttcatatacattaagttgagccatatgtaatcactgtgtttgtaggttagaaacagctgagtatcgtagtttcatatatggttccagctaatacatgcaatgtggctggtgaacacttctgaattcagaaactatcccagatctcagctagaaccatccactgttctgtttgtccagtttcaacttaagggatctccatgcggtccctggaagtacccattgaaacatgcgtatttgtgtatagcagaactctgaaataatattctgacagcagttatctctgaggaattgggttataggtgattttccctttccgcatgataaatttatgtaatatttgactgacttgaccgtaagtatgttacttgtataataaaaggaaaaaaggtacttctattttgaaaaaataaaaataaaagcctttgggttcttgaatggaggatcatggaacacatttgctgccatatgcagttatgttgatgctctgcaaacctgtgctgagccctgttgctcaagcccttcctcatctcttcttgagggagaaggtggagacttccttaaggagatgtgacatatgggaagacaacagattcagaaatttacgtggataggactttagacaccacccagcccaaacttccaaataaaatatggaacgcaa

SEQ ID NO: 86 - protein, 103 aa, Homo sapiens
METTNGTETWYESLHAVLKALNATLHSNLLCRPGPGLGPDNQTEERRASLPGRDDNSYMYILFVMFLFAVTVGSLILGYTRSRKVDKRSDPYHVYIKNRVSMI

SEQ ID NO: 87 - DNA, 2199 bp, Homo sapiens
acgtgatccacccgcctcggcctcccaaagtttttggattacaggtgtgagccacctcgcccggtcctatctctctttcttctctttctccctctcactttgtttctcttctctctctctctcccgcctccttcccccgtctcccctcccttccccccaccgccctcttcatagctgagcctgtccggcagtgcggcggatgtacggatgattcagtggctggcaggaagcccgccctgcccgcccgccagtgtcagtggtgttggcatcagcttgggcaggtgtgcgggctcaggatggggcggccgtggtgaggaaccctggactctcagagatggaatttcaccgtgttgcctaggctggtctggagctcttgatctcaagcgatcctccctgcctcggcctcccaacgtgctgggattataggcgtgagccaccgctcctggccagggtctgttcctagttgcaacagttcttggaaacccactcgagagggccacgcctccattcaccaggccacgcatcacaagaggcaacaccaggagccaacatgagctcggggactgaactgctgtggcccggagcagcgctgctggtgctgttgggggtggcagccagtctgtgtgtgcgctgctcacgcccaggtgcaaagaggtcagagaaaatctaccagcagagaagtctgcgtgaggaccaacagagctttacggggtcccggacctactccttggtcgggcaggcatggccaggacccctggcggacatggcacccacaaggaaggacaagctgttgcaattctaccccagcctggaggatccagcatcttccaggtaccagaacttcagcaaaggaagcagacacgggtcggaggaagcctacatagaccccattgccatggagtattacaactgggggcggttctcgaagcccccagaagatgatgatgccaattcctacgagaatgtgctcatttgcaagcagaaaaccacagagacaggtgcccagcaggagggcataggtggcctctgcagaggggacctcagcctgtcactggccctgaagactggccccacttctggtctctgtccctctgcctccccggaagaagatgaggaatctgaggattatcagaactcagcatccatccatcagtggcgcgagtccaggaaggtcatggggcaactccagagagaagcatcccctggcccggtgggaagcccagacgaggaggacggggaaccggattacgtgaatggggaggtggcagccacagaagcctagggcagaccaagaagaaaggagccaaggcaaagagggaccactgtgctcatggacccatcgctgccttccaaggaccatttcccagagctactcaacttttaagcccctgccatggttgctcctggaaggagaaccagccaccctgaggaccacctggccatgcgtgcacagcctgggaaaagacagttactcacgggagctgcaggcccgtcaccaagccctctcccgacccaggctttgtggggcaggcacctggtaccaagggtaacccggctcctggtatggacggatgcgcaggatttaggataagctgtcacccagtccccataacaaaaccactgtccaacactggtatctgtgttcttttgtgctatgaatttggattcctaattgctattgttggttgctggggttttaaatgattgataagcttgtacagttaacttatagagggggagccatatttaacattctggatttcagagtagagatttctgtgttgtctcctagaaagcattacatgtagtttatttcagcatccttgttgggtggggccctggctctcttcccctttggtgggacctcccctttctttgggcttcagttcactcaggaagaaatgaggctgtcgccatctttatgtgcttccagtggaaatgtcacttgctacagacaatagtgcatgagagtctagagaagtagtgaccagaacagggcagagtaggtcccctccatggccctgaatcctcctctgctccagggctggcctctgcagagctgattaaacagtgttgtgactgtctcatgggaagagctggggcccagagggaccttgagtcagaaatgttgccagaaaaagtatctcctccaaccaaaacatctcaataaaaccattttagttgaaaagcaaaaaaaaa

SEQ ID NO: 88 - protein, 243 aa, Homo sapiens
MSSGTELLWPGAALLVLLGVAASLCVRCSRPGAKRSEKIYQQRSLREDQQSFTGSRTYSLVGQAWPGPLADMAPTRKDKLLQFYPSLEDPASSRYQNFSKGSRHGSEEAYIDPIAMEYYNWGRFSKPPEDDDANSYENVLICKQKTTETGAQQEGIGGLCRGDLSLSLALKTGPTSGLCPSASPEEDEESEDYQNSASIHQWRESRKVMGQLQREASPGPVGSPDEEDGEPDYVNGEVAATEA

SEQ ID NO: 89 - DNA, 3960 bp, Homo sapiens
gtttttctctgcttggtgagcagagataaagggggcagcaggaccgggcccaccagccatccgggctgcccacgcaaaccacagggccgaatccggagccgcccaaggccacacagctaagccgagtgcgtgaatgcttatgtgaccgtgtgaaggaggttcccaccgtgtggctgtgggggatggaaaaaggctacttggaaagatgtagaagaccttcgagtaaacagttacgtttcagaaacagagcctgctcagaatgtgtacttggtgggattctattcttagggacgcttctttcttctgagagacccgagctctgtggcgagtggcacaggcagggccccttcctttcctagttgggttctgacagctccgaggcagtggtttacacaaccaacacgaaacatttctacgatccacccgattcctcccctcattgatattcaggaagcagctctccttcccctgccttcagctcaagtttgctgagcttttgtttcatttgtgaatacttcttgctggaagtccctcacccagagaccagtgctcccaacggcagagcagcgggggagataaagaactggtgacacgtggctgtacattcagcacagctgtggtgtccccaagtgccatgacccaggagccattcagagaggagctggcctatgaccggatgcccacgctggagcggggccggcaagaccccgccagctatgccccagacgcgaagccgagcgacctgcagctgtcgaagagactgcccccctgcttcagccacaagacgtgggtcttctctgtgctgatggggagctgcctcctggtgacctcggggttttcgctgtacctggggaacgtgttcccggctgagatggattacttgcgctgtgctgcaggctcttgcatcccctcggcaattgtgagcttcaccgtctccaggaggaacgccaatgtgattcccaactttcagatattgtttgtttccacgtttgctgtgaccactacgtgtttaatttggtttggatgcaaactagtcctgaacccatcagcaataaacatcaacttcaacctcatcctgctgctcctgctggagctgctcatggcggccacggtgatcatcgctgcacggtccagcgaggaggactgcaagaaaaagaagggctccatgtctgacagcgccaacattctggacgaagtgccatttcctgctcgggtcctgaaatcttactcagtcgtcgaggtaatcgcaggcatctctgccgtcctcggggggatcattgccctgaacgtggatgactcagtttcaggcccacacctctcagtgacgttcttttggatcctagtggcctgctttccaagtgccattgccagtcatgtggcagcagagtgtcccagcaagtgtctggtggaggtcctgattgccataagcagcctcacgtctccgctgctgttcacagcctctggatatctgtcattcagcatcatgagaatcgtggagatgtttaaggattacccgccagccataaaaccatcctacgatgtgctgctgctgctgctgctgctagtgctcctgctgcaggccggcctcaacacgggcaccgccatccagtgcgtgcgcttcaaggtcagtgcaaggctgcagggtgcatcctgggacacccagaacggcccgcaggagcgcctggctggggaggtggccaggagccccctgaaggagttcgacaaggagaaagcctggagagccgtcgtggtgcaaatggcccagtgacccccagacgcggaaaccgggtggcagcgcccagcctggccccaagcatggaaacgcacaacccctaatcgccctgagctactgcttctaacacctcttttcccttgtgtgagggcaaaccaggctgcaggtggggttttcacttcctagggtagtttaattttaaaataggccaatgttggctagtctgtgcctcagtgagatcagtcagctccgagtggctcccgtgtcgtaacagcaggagcatggccgcaacttcccaggccgaggaagggcccccggctcggcctcttgagagccccacccctgaactggccccagctcctcttcctgcctctctcatggcttgggctggagtgggctctctggacctgaccagactgtgggtccctgcgtctcctgcccactctgaccgggcttcctccctccacgcttagggtctgtcccgggtactcagtcagcccagtgggatcttacccacttccctgcaaggtgcacctgccccaggctcaggctgcccagcggctcttcctggacagtgagagcagggctgggcgcctctgtcctggcccgggagccgcaggggcccctcctccagagcctgggcgcaagcgacacaggctgccgctgctctcccaggtgaaatccacaccagtccacgccgggtcgcctgccctgtctccctacttagacccagtcattctagagggatccaccgccacactggccggcccacgtcctgggtgctgtcatgcccagcttggagtgccacgtggccgctgcccacgtcccgggcactgtcatgcccagcttggagtgccacatggccgctgcccacgtcccgggcactgtcatgcccagcttggagtgccacgtggccgctgctgtgacaggcagtgttcttgggggtggggctgcatccaaggctttgtaaaccggctggaccacgtctccctggccccagtgaccgggggaagctgagcccctccctcctgtgtttgctcccattactcaaaatgcaggacagatcaggtcagagcccaggaattctcacaggttcacccagcgccctctacctcctagcaagtactttgtcttgatcctcactgagaaggccccagggcagcggtcttctccatctccgctgttttggggtcttagggtacagcccaggcggtcactgcccacctgccaggctgcagggacagttgggtgtgagaataacactggctttgggtagtgccatggccaggagtgggtttccctgcgtctcctcgtcccgagggcgcctgggtcctcccagctgacggcagtaaatccacagtgagttggggcgactgtgaaactggaatgctgttactttgataattactttccagcaggtgttttccttcacaatggttttgtttctttccttctgatctgagaagacatgaacgttttctcttcaccgccgtggggtgtattgactggtcccccatgggctgctggaaaggcccggagatgcatctgtggcctggggccatcaagatcaaagaaccaggaggcctgggagatgcagctggatggggcggcctgcagaccctgccagggggtttgaggaccctcccaggtttcccactgcggaacaggagtgactctggctgccaagataccttcatggtgttcatgacaagtggaatcattattttcaaccattgaagggggatgcaggcaagacaccttcccagctgctcctagaggggacaagccaggccctctctgcagtcctcggcagctccggaaggacacagtcaggggccgggcaaacactttggccacagccccaaacaagcgccaccgtgggagaggagaggctgctgtcactggtaccggatgcagaccccaccctgtctgcaggccacccccacctccctgcagctttgaggctggcggggtctgctcctgggaatggggtgggagccacagggacgacccggggcgggctgatgtcttcttgggggcagaccagagagctcaagtttcagagtcagaattaggcacttggagcgtttttgctggcttgcactttcttattttcttattttagagcgcttaaaaaatccggaaaaatggggtttaaaagaactgtctctttcagtctacatttttgtttaatacgcttgagcaataaacgctgacttgcagacgtg

SEQ ID NO: 90 - protein, 377 aa, Homo sapiens
MTQEPFREELAYDRMPTLERGRQDPASYAPDAKPSDLQLSKRLPPCFSHKTWVFSVLMGSCLLVTSGFSLYLGNVFPAEMDYLRCAAGSCIPSAIVSFTVSRRNANVIPNFQILFVSTFAVTTTCLIWFGCKLVLNPSAININFNLILLLLLELLMAATVIIAARSSEEDCKKKKGSMSDSANILDEVPFPARVLKSYSVVEVIAGISAVLGGIIALNVDDSVSGPHLSVTFFWILVACFPSAIASHVAAECPSKCLVEVLIAISSLTSPLLFTASGYLSFSIMRIVEMFKDYPPAIKPSYDVLLLLLLLVLLLQAGLNTGTAIQCVRFKVSARLQGASWDTQNGPQERLAGEVARSPLKEFDKEKAWRAVVVQMAQ

SEQ ID NO: 91 - DNA, 2943 bp, Homo sapiens
ggcgcggtcaggtgctccgctccagagttgagcgcaggtgagctcctgcgcgttccgggggcgttcctccagtcaccctcccgccgttacccgcggcgcgcccgagggagtctcctccagaccctccctcccgttgctccaaactaatacggactgaacggatcgctgcgaggattatcttacactgaactgatcaagtactttgaaaatgacttcgaaatttctcttggtgtccttcatacttgctgcactgagtctttcaaccaccttttctctccaaccagaccagcaaaaggttctactagtttcttttgatggattccgttgggattacttatataaagttccaacgccccattttcattatattatgaaatatggtgttcacgtgaagcaagttactaatgtttttattacaaaaacctaccctaaccattatactttggtaactggcctctttgcagagaatcatgggattgttgcaaatgatatgtttgatcctattcggaacaaatctttctccttggatcacatgaatatttatgattccaagttttgggaagaagcgacaccaatatggatcacaaaccagagggcaggacatactagtggtgcagccatgtggcccggaacagatgtaaaaatacataagcgctttcctactcattacatgccttacaatgagtcagtttcatttgaagatagagttgccaaaattattgaatggtttacgtcaaaagagcccataaatcttggtcttctctattgggaagaccctgatgacatgggccaccatttgggacctgacagtccgctcatggggcctgtcatttcagatattgacaagaagttaggatatctcatacaaatgctgaaaaaggcaaagttgtggaacactctgaacctaatcatcacaagtgatcatggaatgacgcagtgctctgaggaaaggttaatagaacttgaccagtacctggataaagaccactataccctgattgatcaatctccagtagcagccatcttgccaaaagaaggtaaatttgatgaagtctatgaagcactaactcacgctcatcctaatcttactgtttacaaaaaagaagacgttccagaaaggtggcattacaaatacaacagtcgaattcaaccaatcatagcagtggctgatgaagggtggcacattttacagaataagtcagatgactttctgttaggcaaccacggttacgataatgcgttagcagatatgcatccaatatttttagcccatggtcctgccttcagaaagaatttctcaaaagaagccatgaactccacagatttgtacccactactatgccacctcctcaatatcaccgccatgccacacaatggatcattctggaatgtccaggatctgctcaattcagcaatgccaagggtggtcccttatacacagagtactatactcctccctggtagtgttaaaccagcagaatatgaccaagaggggtcatacccttatttcataggggtctctcttggcagcattatagtgattgtattttttgtaattttcattaagcatttaattcacagtcaaatacctgccttacaagatatgcatgctgaaatagctcaaccattattacaagcctaatgttactttgaagtggatttgcatattgaagtggagattccataattatgtcagtgtttaaaggtttcaaattctgggaaaccagttccaaacatttgcagaaaccattaagcagttacatatttaggtatacacacacacacacacacacatacacacacacggaccaaaatacttacacctgcaaaggaataaagatgtgagagtatgtctccattgttcactgtagcatagggatagataagatcctgctttatttggacttggcgcagataatgtatatatttagcaactttgcactatgtaaagtaccttatgtattgcactttaaatttctctcctgatgggtactttaatttgaaatgcactttatgcacagttatgtcttataacttgattgaaaatgacaactttttgcacccatgtcacagaatacttgttacgcattgttcaaactgaaggaaatttctaataatcccgaataatgaacgtagaaatctatctccataaattgagagaagaagaaggtgataagtgttgaaaattaaatgtgataacctttgaaccttgaattttggagatgtattcccaacagcagaatgcaactgtgggcatttcttgtcttatttctttccagagaacgtggttttcatttatttttccctcaaaagagagtcaaatactgacagattcgttctaaatatattgtttctgtcataaaattattgtgatttcctgatgagtcatattactgtgattttcataataatgaagacaccatgaatatactttttttctatatagttcagcaatggcctgaatagaagcaaccaggcaccatctcagcaatgttttctcttgtttgtaattatttgctcctttgaaaattaaatcactattaattacattaaaaatcaaattggataaaacaatgttttctttctggtagcgcataataacagagcacaagcatcttttagatttgagcatttgaagattcaaagttgcgaaagagcacaaaccatattaggtaaaatattggccactcgatccttgaaaagaactgtgtggagcctggaaaaaaaaattaggaccacatgtgagatgtttacaagacacccagaacagtggtaaagtgtgcatactagaaaaagcagcaaaataactctttgtggtaacaggtatcaaaacacgggagccgagatgatatagctctgtttcaagaaatatgtgaatacccacctaccaggtgctcagtggaatcaaagatgaatccaagttcacaaatagacttctacttc

SEQ ID NO: 92 - protein, 477 aa, Homo sapiens
MTSKFLLVSFILAALSLSTTFSLQPDQQKVLLVSFDGFRWDYLYKVPTPHFHYIMKYGVHVKQVTNVFITKTYPNHYTLVTGLFAENHGIVANDMFDPIRNKSFSLDHMNIYDSKFWEEATPIWITNQRAGHTSGAAMWPGTDVKIHKRFPTHYMPYNESVSFEDRVAKIIEWFTSKEPINLGLLYWEDPDDMGHHLGPDSPLMGPVISDIDKKLGYLIQMLKKAKLWNTLNLIITSDHGMTQCSEERLIELDQYLDKDHYTLIDQSPVAAILPKEGKFDEVYEALTHAHPNLTVYKKEDVPERWHYKYNSRIQPIIAVADEGWHILQNKSDDFLLGNHGYDNALADMHPIFLAHGPAFRKNFSKEAMNSTDLYPLLCHLLNITAMPHNGSFWNVQDLLNSAMPRVVPYTQSTILLPGSVKPAEYDQEGSYPYFIGVSLGSIIVIVFFVIFIKHLIHSQIPALQDMHAEIAQPLLQA

SEQ ID NO: 93 - DNA, 3431 bp, Homo sapiens
gccgcgcggcgcgggggaggagaccttcatctgttcacgcggtagcgcggattgcggttcgcggcgcgcgccaccggggaaggagcggtgggccgaggggttggaggtggggccccaggaggacctcgggctgtgggccgggagagcggagtcggggagtggggcgggggagcgaggtggcgccggggagcctgggatatggcgcggccagacgatgaggagggggcggcggtggcgcccggacacccgctcgcgaaaggatacctcccgttgccgaggggcgcgcccgttgggaaggagagcgtggagctgcagaacgggcccaaagcgggcaccttcccggtgaatggggccccccgggacagcctcgctgccgcctcgggagttctgggcgggcctcagactccactggccccagaagaggagacccaggcccggctgctgcctgcgggcgcgggagctgagaccccgggggccgagagcagcccgctgccccttacggcgctctccccgcggcgcttcgtggtgctcctgatcttcagcctgtactcgctggtcaacgcctttcagtggatccagtacagcatcattagcaacgtcttcgagggcttctacggtgtcaccttgctgcacatcgactggctgtccatggtgtacatgctggcctacgtgcccctcatcttcccggccacctggctgctggacaccagaggcctgcggctcaccgccctgctgggctccggcctcaactgcctgggtgcctggatcaagtgcggcagtgtgcagcagcatctcttctgggtcaccatgttgggccagtgcttgtgctcggtggcccaggtgttcatcctgggcttgccctcccgcatcgcctcagtgtggtttgggcccaaagaggtgtccacagcttgtgccaccgccgtgctgggcaatcagcttggaactgcagttggctttttgctaccaccagttttagtacccaacacacagaatgacacaaatctcctggcttgtaatatcagcaccatgttttatggaacatcagctgttgccacacttttatttattttaacagcaattgccttcaaagaaaaacctcggtatccaccaagtcaggctcaagcagctcttcaagacagtccccctgaagagtactcctataagaaatcaataagaaacctgtttaaaaacattccttttgtccttctgttgatcacttatggtatcatgactggtgccttttattcagtctcaacgttattaaatcaaatgatattgacatattatgagggagaagaagtcaatgctggaaggattgggctaacgctagtagtagctggaatggtgggctctattctttgtggcttatggctggattatactaaaacatacaaacagactactctgatagtttatattttgtcttttattggaatggttatctttactttcacattggaccttagatatattatcatcgtgtttgttactggaggggtgcttggcttcttcatgactggttacctccctttgggttttgaatttgctgttgaaatcacttaccctgaatctgaaggtacttcatctggtcttcttaatgcttctgcacagatatttggaattttgttcacattggctcaaggaaagctcacatcagactatggtcctaaggcagggaacatttttctctgtgtctggatgtttataggcatcatattaacagcattaatcaagtctgatctgcgaagacacaacataaatataggaattacaaatgttgatgttaaagctataccagctgacagtcccacagaccaagaaccaaaaacggttatgttgtccaagcagtcagaatcagcaatttgaagagaaaggcaaagttactgtcctgtagtaattggggacaatgtgatcatccttggagagagatgtgagcaccaaggctgggtttgtatgtggtgggggaataaacacacttacttgaaaattaccatatgaactctaaatgcataattattattttgcttaattgttaaattaagggaaattttcttaaaattcttctgtttacatcatgttaacactactgtttatctaattagtatccggtttttagtctcatattgtatctgaaagtaagcttcttgacgtttactttttaaaagtcgatgtttttcttttttgtagaaaatggaagcttagaatactttttaaagtgataatatggggtgttcagtccccataagatataatagttcatgcagtttatatattaaagtatccagtggaactaaatgtacaatatattcctaattggctgcctttttcactgtgctgaccagctgttcaagccacttcagtttgagtacaacataccaacatgacactactcacccacaaaggacagcattgggatcaggctttcagatgacctctaagatttttcccatttattgtactcttgttacaaagtactttttaacacatgcagtcaatggctataaaaactattctgtgtacagattctacccagactttggtcttagaattatgttctaattaaggagcctggttacaggttcattctgtcttgagttcttttctgtgctgcctttctatcatggataaatgctaacgctgtattttttcactccaacttgagatagagtagttttgtacccattgccttttttttcttttaaactctctttttttttttttcctgatgtgtaactttctagtaagataatttcatcatgtatgttactggctatttcatgatttcatgtatcacatcgtatattttgccttgaagattcctgaaataaggaaatctataataacttcagatagcctacatgtccccatttagtggagacctcttgaatgctatttgaattctgcagtatcatttttatgaccattctcctttgaggaatactatgcccaggtacatgctctatcagtgtgccgggagagtggattcttttcttcactgcagagtcatcacactgttagaatagtctgctcttttacatgctcaggtagggaaaataggaccaaatatatttccacagtgcctaccactgtgtcatgtttacagtgagagtttaaatattgttgatgtcctgactctgtgagctcatagggagtatcttcatagtaatgacatttgatcagccataaaatttacattatgttcatatgcacccaaaaaagctagtcaggtaatgaatacccttgaagtgaatagcaattttgatttaggcagtgtgttaggccatccttgcattgctataaagaaatatttaggctgggcgtggtggctcacgcctgtaatcccagcactttgggaggctgaagcgtgtggatcacctgaggtcaggagttcaagaccagcctggccaacatggtaaaaccccatctctact

SEQ ID NO: 94 - protein, 555 aa, Homo sapiens
MARPDDEEGAAVAPGHPLAKGYLPLPRGAPVGKESVELQNGPKAGTFPVNGAPRDSLAAASGVLGGPQTPLAPEEETQARLLPAGAGAETPGAESSPLPLTALSPRRFVVLLIFSLYSLVNAFQWIQYSIISNVFEGFYGVTLLHIDWLSMVYMLAYVPLIFPATWLLDTRGLRLTALLGSGLNCLGAWIKCGSVQQHLFWVTMLGQCLCSVAQVFILGLPSRIASVWFGPKEVSTACATAVLGNQLGTAVGFLLPPVLVPNTQNDTNLLACNISTMFYGTSAVATLLFILTAIAFKEKPRYPPSQAQAALQDSPPEEYSYKKSIRNLFKNIPFVLLLITYGIMTGAFYSVSTLLNQMILTYYEGEEVNAGRIGLTLVVAGMVGSILCGLWLDYTKTYKQTTLIVYILSFIGMVIFTFTLDLRYIIIVFVTGGVLGFFMTGYLPLGFEFAVEITYPESEGTSSGLLNASAQIFGILFTLAQGKLTSDYGPKAGNIFLCVWMFIGIILTALIKSDLRRHNINIGITNVDVKAIPADSPTDQEPKTVMLSKQSESAI

SEQ ID NO: 95 - DNA, 4522 bp, Homo sapiens
cctgtcccctcagcagtgttggtttctcttcttgacttgatgcaggcacagatttatcaagctcctcagtcaacaaacacatcaccggaagaaatatggaaggaaaggaattttaaaaggaaataccaatctctgtgcaaacaaagccttgtatattcatgtttgcaccaatctactgtgagatttatgaagaaaaacaaattgcggacaactctctatgtacacttacaaatgcctcagttgatgcttgtgggctgtttgtcagcgttctgtgataatgaacacatggacttctgtttattaaattcagttgacccctttagccaattgccaggagcctggatttttacttccaactgctgatatctgtgtaaaaattgatctacatccaccctttaaaagcattgatgaattaattagaactttagacaacaaagaaaaattgaaaaagaattctcagtaaaagcgaattcgatgttcaaaacaaactacaaagagacaagacttctctgtttactttctaagaactaatataattgctaccttaaaaaggaaaaaatgaacagcacatgtattgaagaacagcatgacctggatcactatttgtttcccattgtttacatctttgtgattatagtcagcattccagccaatattggatctctgtgtgtgtctttcctgcaagcaaagaaggaaagtgaactaggaatttacctcttcagtttgtcactatcagatttactctatgcattaactctccctttatggattgattatacctggaataaagacaactggactttctctcctgccttgtgcaaagggagtgcttttctcatgtacatgaatttttacagcagcacagcattcctcacctgcattgccgttgatcggtatttggctgttgtctaccctttgaagttttttttcctaaggacaagaagatttgcactcatggtcagcctgtccatctggatattggaaaccatcttcaatgctgtcatgttgtgggaagatgaaacagttgttgaatattgcgatgccgaaaagtctaattttactttatgctatgacaaataccctttagagaaatggcaaatcaacctcaacttgttcaggacgtgtacaggctatgcaatacctttggtcaccatcctgatctgcaaccggaaagtctaccaagctgtgcggcacaataaagccacggaaaacaaggaaaagaagagaatcataaaactacttgtcagcatcacagttacttttgtcttatgctttactccctttcatgtgatgttgctgattcgctgcattttagagcatgctgtgaacttcgaagaccacagcaattctgggaagcgaacttacacaatgtatagaatcacggttgcattaacaagtttaaattgtgttgctgatccaattctgtactgttttgtaaccgaaacaggaagatatgatatgtggaatatattaaaattctgcactgggaggtgtaatacatcacaaagacaaagaaaacgcatactttctgtgtctacaaaagatactatggaattagaggtccttgagtagaaccaaggatgttttgaagggaagggaagtttaagttatgcattattatatcatcaagattacattttgaaaaggaaatctagcatgtgaggggactaagtgttctcagagtgatgttttaatccagtccaataaaaatatcttaaaactgcattgtacagctccctccctgcgttttattaaatgatgtatattaaacaaagatcaatattttcttaatgactcagggtctttattgttaatgccaattgtttttgtatctgtgctataatcccttagagtcagtaaagtatgtaggggactgtttcttcctttgtgtctgggtttatgatttttctcactctttctttggactccagggtgtcagccatcaggtctcctaattttgtgtaccggtctccaacaaccccagctactgaatactgcttctaatctcctcattcattaacaaatctttatttttttatcttgtataaaataactgctttattgacacaaaatttacataacttaaaattcaactttgtattgtgtacaattcagtgattttttgtatattcacagagctgtgcaaccatcaccacactcaaaaaattttcatcacccaccaaagaaatcttatactcttagcagtcgctccctgctctcccgtccatgccagttattaatttactttctgtctctaaggattttcattactctgaacatttcatataaatagaattatacaatatgtggcctactgtgacgtatttcacttagtataatggtttcaagttttatccatgtgtagaatgtatcagcacttcatttctttttatggcctgatagtattctgttgcatggttatactccattttgtttatctaatcacttggcttcattaacaaatatttattgaatccattccataaactaggttttgagttaagtactggggctatgaaagaaatggtctcatgaagcctcacgaagtttacattagttcaaaagcctagtcaccgagcttgaaagatttctatataaaggaaaaggaaataggctctgagttttattttgatctctttttaatttataactgggtataacatagctgaaattaccagaagtttaatgcatagacaaataaatagttctattatatctttctttttggacttagaatgttagaatattttgagagttctttttttttttttttttgagtcagagtcttgctctgtaatccaggctagagtgtagtggtgcgatctccactcactgcagcctccacctcccaggttcaagcgattctcctgcctcagcctcccaagtagctgggattacaggcacccaccaccatgcccagctaatttttgtatttttagtagagacggggtttcaccatgttgcacaggctggtctcaatcgaactcctgacctcaagtgatcatcccacctaggtctcccaaagtgctgagatgacaggcgtgagccaccatgcctggcaaagagagtcttgatacaacatattcttttgaatcctcattgtgtaaattgcctcgttgtaaatagacactcagtaaacattttcctcaccaaaatatttttaaggatttttctacccttctccttttctctttgctttccttttcttgcctgttctttccactccccccaaaatgatcagatagcaaatgtcttgataacatgaggtgccctcacattaaaaaacaaaatattgagccgggcgcggtggctcatgcctgtaatcccagcactttgggaggctgaggtgggcagatcgccttaggtcaggagttggagaccaggctgaccaatatgatgaaactctgtctctactaaaaattcaaaaatgtgccagacctggcctggtggcatgtgcctgtaatcccagctacttgggaggctgagtcataagcctgcaatgggaaaatggatcgaatctggggtgagggggaagtgatgtgggggttatggtacctcttttctcttccaaagatgctgttcttactgcatcacttgtggctggccaggaaaagccatgcaggagttttgtttgtggccactaggtgacgatcgtgttctgtacgggacctcttattaatagttcaccactagccgccactccagaagagcggaggaacccaggataatattttgtcaaccaagaaacaagaagtccctcccaggaactggaaatgaatggggaaaatgctgaaatctcatttgcactattcatttctcttctctctggaaagctcggcaatcatcaggtcatttcatttggcttaaattccatgtgtctttccaaacttttaaaagctggtgaaaattgttccacccatatgtaaaagaacataggttaagttgtctaattcttgcaggaatgtggatatagcattaaaaatatgtctttgtatacttatcttacccatgtaagaaaagagtggccaactttcatataaatagaaagagaacatttaagctatatgcagtttgcatttttgtctactattatgaaattattatctatgaaattcaagctgtaactcaacatatgtataattttaatttctaatttattgttagatctcagcacttaaaaaattacatcttgtatttgaattgttaaatctgttccctgcaaagaacagtaatacaatcatgttctaatttactagcatttgcatattttagaaatataatggcctgtaatttacttttcttttgcctataattttctgaagctctttatgatgcaccggtgcatttttatttaaaaaatagattgtgactcctcaaataatgttacaattcgatgttcaaaaagcaatccaggtacatagccataaagggatgagctagagaggtctccatattatcattcaatgtgagaataaaaattctatattttattctagaataaaattataaatttctttatcta

SEQ ID NO: 96 - protein, 337 aa, Homo sapiens
MNSTCIEEQHDLDHYLFPIVYIFVIIVSIPANIGSLCVSFLQAKKESELGIYLFSLSLSDLLYALTLPLWIDYTWNKDNWTFSPALCKGSAFLMYMNFYSSTAFLTCIAVDRYLAVVYPLKFFFLRTRRFALMVSLSIWILETIFNAVMLWEDETVVEYCDAEKSNFTLCYDKYPLEKWQINLNLFRTCTGYAIPLVTILICNRKVYQAVRHNKATENKEKKRIIKLLVSITVTFVLCFTPFHVMLLIRCILEHAVNFEDHSNSGKRTYTMYRITVALTSLNCVADPILYCFVTETGRYDMWNILKFCTGRCNTSQRQRKRILSVSTKDTMELEVLE

SEQ ID NO: 97 - DNA, 2632 bp, Homo sapiens
gggcccggcgcgcggtagcgcgggcccctcagtgcacaatggctagagcaggcggcggagccccaaccccacccagtgcggagcgcgccgcgagccccgccgcaagctgagcgcctccgcccgccaggcgcgccggcgccgggccatgtactcggggaaccgcagcggcggccacggctactgggacggcggcggggccgcgggcgctgaggggccggcgccggcggggacactgagccccgcgcccctcttcagccccggcacctacgagcgcctggcgctgctgctgggctccattgggctgctgggcgtcggcaacaacctgctggtgctcgtcctctactacaagttccagcggctccgcactcccactcacctcctcctggtcaacatcagcctcagcgacctgctggtgtccctcttcggggtcacctttaccttcgtgtcctgcctgaggaacggctgggtgtgggacaccgtgggctgcgtgtgggacgggtttagcggcagcctcttcgggattgtttccattgccaccctaaccgtgctggcctatgaacgttacattcgcgtggtccatgccagagtgatcaatttttcctgggcctggagggccattacctacatctggctctactcactggcgtgggcaggagcacctctcctgggatggaacaggtacatcctggacgtacacggactaggctgcactgtggactggaaatccaaggatgccaacgattcctcctttgtgcttttcttatttcttggctgcctggtggtgcccctgggtgtcatagcccattgctatggccatattctatattccattcgaatgcttcgttgtgtggaagatcttcagacaattcaagtgatcaagattttaaaatatgaaaagaaactggccaaaatgtgctttttaatgatattcaccttcctggtctgttggatgccttatatcgtgatctgcttcttggtggttaatggtcatggtcacctggtcactccaacaatatctattgtttcgtacctctttgctaaatcgaacactgtatacaatccagtgatttatgtcttcatgatcagaaagtttcgaagatcccttttgcagcttctgtgcctccgactgctgaggtgccagaggcctgctaaagacctaccagcagctggaagtgaaatgcagatcagacccattgtgatgtcacagaaagatggggacaggccaaagaaaaaagtgactttcaactcttcttccatcatttttatcatcaccagtgatgaatcactgtcagttgacgacagcgacaaaaccaatgggtccaaagttgatgtaatccaagttcgtcctttgtaggaatgaagaatggcaacgaaagatggggccttaaattggatgccacttttggactttcatcataagaagtgtctggaatacccgttctatgtaatatcaacagaaccttgtggtccagcaggaaatccgaattgcccatatgctcttgggcctcaggaagaggttgaacaaaaacaaattcttttaattcaacgggtgctttacataatgaaaaaaccacttgtggcacacgatgggcatctaacatcatcatcttctaatgtgttggagattttcatttcaaatatattttttaaattactctattttccaaaacacgtaatgcatttttctcgaaaataccttactgtaaaaataactgtcgcgtacacatgtgtgaagtagctagaacatactgaattttttttgtactgttggactctattcagtgtcatgtcctatatctgatcaagttatcaaggagataattctagaatgaaaaagaaaatcctcttgttggaaacaaaagacgttttatatgtgcagtatgacaaagaggagtttcagagacaactttgaatccttgtcagcctggagaccagcaccagaggaatctacaaggcaaactcccatatatttgcttcccccaaattgctgcccctacagactcaaagctctttttctttgttttgttgtttctctaaaaatttactgttctttgtcgatgctatataagccagggagttctaagacgccagctctttgagatttgctcattcccctgtatttcccacatatatattacatatacccgctaataaatttatgtttgtttttctcttgtcaatctgtcttttgttataggggccccagccaaggaacctaaagtgggtagaaggaaaaattattttttctttccctacaaactgaacatggattattagaactcaaggttttcattgacaatatagaaaagaaacactgaatcattttattttattgcccaatttttatttcttatatgactctagtgtttcatcttcataattaatcatgtttgaaggatttctgagtgactcagcagcctgttaaagaaggatgaaccaaagaaaacatttcactaaatgtgcttttaaaaatcaagtgtattgctggttctgctgcagtatgtagtcgaagaataaattagtaaattgcttctgagggtctgaaattgaataaagtaatggctttgtatttctataaaagttgtctccccttgtttcctttccattctggcacatgtagacatttaattta

SEQ ID NO: 98 - protein, 402 aa, Homo sapiens
MYSGNRSGGHGYWDGGGAAGAEGPAPAGTLSPAPLFSPGTYERLALLLGSIGLLGVGNNLLVLVLYYKFQRLRTPTHLLLVNISLSDLLVSLFGVTFTFVSCLRNGWVWDTVGCVWDGFSGSLFGIVSIATLTVLAYERYIRVVHARVINFSWAWRAITYIWLYSLAWAGAPLLGWNRYILDVHGLGCTVDWKSKDANDSSFVLFLFLGCLVVPLGVIAHCYGHILYSIRMLRCVEDLQTIQVIKILKYEKKLAKMCFLMIFTFLVCWMPYIVICFLVVNGHGHLVTPTISIVSYLFAKSNTVYNPVIYVFMIRKFRRSLLQLLCLRLLRCQRPAKDLPAAGSEMQIRPIVMSQKDGDRPKKKVTFNSSSIIFIITSDESLSVDDSDKTNGSKVDVIQVRPL

SEQ ID NO: 99 - DNA, 1637 bp, Homo sapiens
tctgcccatggtgaagacataaatatcttagctagggctcagcagagaaattgaagaaaaataaagatatcaccagaacagttatgtgaagatcgatcagcaaactttagagatttctgctttgacgttgagccaacaatgaaagaaggagcagaaaaaggagaaggaagaagaactccactggacactcaaggatgtgaatagcattttagatcagtgaataaccagcagtgacattagacattgaactttctctgttctgacatggaaagtgccctgccgagtatcttcactcttgtaataattgcagaattcataattgggaatttgagcaatggatttatagtactgatcaactgcattgactgggtcagtaaaagagagctgtcctcagtcgataaactcctcattatcttggcaatctccagaattgggctgatctgggaaatattagtaagttggtttttagctctgcattatctagccatatttgtgtctggaacaggattaagaattatgatttttagctggatagtttctaatcacttcaatctctggcttgctacaatcttcagcatcttttatttgctcaaaatagcgagtttctctagccctgcttttctctatttgaagtggagagtaaacaaagtgattctgatgatactgctaggaaccttggtcttcttatttttaaatctgatacaaataaacatgcatataaaagactggctggaccgatatgaaagaaacacaacttggaatttcagtatgagtgactttgaaacattttcagtgtcggtcaaattcactatgactatgttcagtctaacaccatttactgtggccttcatctcttttctcctgttaattttctccctgcagaaacatctccagaaaatgcaactcaattacaaaggacacagagaccccaggaccaaggtccatacaaatgccttgaaaattgtgatctcattccttttattctatgctagtttctttctatgtgttctcatatcatggatttctgagctgtatcagaacacagtgatctacatgctttgtgagacgattggagtcttctctccttcaagccactcctttcttctgattctaggaaacgctaagttaagacaggcctttcttttggtggcagctaaggtatgggctaaacgatgagaaactcacaatttcataagccattcagaccacagattattgaatattgcagacagaaacaggagtctacaaggagtttaaaagatattttatgcttcccctggtttcttttattgtgaaggtcactgtaaatgttttaaattcttctctataatagcatcttacctaagaatattatgtatttatgacatgtatttctacattattaggaatttgaaacttatttgaggaaattattggcagattctattgtaaattaaaaacatatactacagcatacttagatgttaattgtaaatctacaatcttttgtttggcaatggctcttcaattctaaatcattcattgagatgggtgatttaggtaattattttattatctcaagtactcctatttaaatggtgagctacagataattagaacagttatttggaatagaattagggaagtttggacttgcc

SEQ ID NO: 100 - protein, 303 aa, Homo sapiens
MESALPSIFTLVIIAEFIIGNLSNGFIVLINCIDWVSKRELSSVDKLLIILAISRIGLIWEILVSWFLALHYLAIFVSGTGLRIMIFSWIVSNHFNLWLATIFSIFYLLKIASFSSPAFLYLKWRVNKVILMILLGTLVFLFLNLIQINMHIKDWLDRYERNTTWNFSMSDFETFSVSVKFTMTMFSLTPFTVAFISFLLLIFSLQKHLQKMQLNYKGHRDPRTKVHTNALKIVISFLLFYASFFLCVLISWISELYQNTVIYMLCETIGVFSPSSHSFLLILGNAKLRQAFLLVAAKVWAKR

SEQ ID NO: 101 - DNA, 1209 bp, Homo sapiens
aaagttcgaagtgggatgatcacgggcagacctgggtggttgggaacaggaagcatatggcatcttgcaggctataggcaccacaaaatggaacgcaggaggacaggggcttgggagagccacttcactgtcgggtaaaacaacggagcaagatgagtgcctccggatgcttggtttccccaccctccagtgtctgcttgctcttcaagtacctccaccaagctaatgacagtccactttaggacatcacgggcctcgaggttacaactttcccaggctttgttatttggttctctactgcacagaaatagatagaattctgacagccatcattgttaaacatcaggattttctaagaggacagacttaacagtaacatcatggcctcagcaggactccagctccttgctttcatcctggccttatctggggtctctggagtgctcacagccactctgctgcccaactggaaggtgaatgtggatgtggactccaacatcataacagccattgtacagctgcacgggctctggatggactgtacgtggtacagcactgggatgttcagctgtgccctgaaacactccattctgtccctccccatccacgtgcaggctgcgagagccaccatggtcctggcgtgtgttctgtctgctttggggatctgcacttccacagtaggaatgaaatgtactcgcttaggaggggacagagaaaccaagagccatgcttcctttgctggaggagtctgtttcatgtctgcaggaatctctagtttaatctcgacagtgtggtacacaaaggagatcatagcaaactttctggatctgacagttccagaaagcaacaaacatgaacctggaggagctatctatatcggattcatttctgcaatgctgttgtttatctctggcatgattttctgcacctcctgtataaaaaggaatccagaagctagactcgacccacccacacagcagcctatctctaacacacagctcgagaacaattccacacacaatctgaaggattatgtgtaaataactgagtaatgcatatgaaatggaacttttgggtgccaaatgggacttttagattaaaaaaaaatcagaattatgcttaactttccctacaaagaaagtagaatgtaaaatactttaacaactacaaagtagtttaaaatgccaataaaactatcatatacaatta

SEQ ID NO: 102 - protein, 219 aa, Homo sapiens
MASAGLQLLAFILALSGVSGVLTATLLPNWKVNVDVDSNIITAIVQLHGLWMDCTWYSTGMFSCALKHSILSLPIHVQAARATMVLACVLSALGICTSTVGMKCTRLGGDRETKSHASFAGGVCFMSAGISSLISTVWYTKEIIANFLDLTVPESNKHEPGGAIYIGFISAMLLFISGMIFCTSCIKRNPEARLDPPTQQPISNTQLENNSTHNLKDYV

SEQ ID NO: 103 - DNA, 4188 bp, Homo sapiens
gctttatttttcaattcttcctagtcccggttttgcatttctaatgacagtgaactgacaaagcgtgaaagtggtctaaggagcaaaacaaagccagcaagcctgcttctggtgtgccaagattaatcaatattccagaaacctcggggtttccccctcctccctgtgcggtttccattccccactcctcctttcccgggcacagactcctccccttttcttaagttgccctgatagtaacttgcagtttcagagcacatgcacactgtcagggctagcctgcctgcttacgcgcgctgcggattgttgctccgttgtacctgctggggaattcacctcgttactgcttgatatcttccaccccttacaaaatcagaaaagttgtgttttctaataccaaagaggaggtttggctttctgtgggtgattcccagacactgaagtgcaaagaagagaccctcctagaaaagtaaaatatgactaaaagcaatggagaagagcccaagatggggggcaggatggagagattccagcagggagtccgtaaacgcacacttttggccaagaagaaagtgcagaacattacaaaggaggatgttaaaagttacctgtttcggaatgcttttgtgctgctcacagtcaccgctgtcattgtgggtacaatccttggatttaccctccgaccatacagaatgagctaccgggaagtcaagtacttctcctttcctggggaacttctgatgaggatgttacagatgctggtcttaccacttatcatctccagtcttgtcacaggaatggcggcgctagatagtaaggcatcagggaagatgggaatgcgagctgtagtctattatatgactaccaccatcattgctgtggtgattggcataatcattgtcatcatcatccatcctgggaagggcacaaaggaaaacatgcacagagaaggcaaaattgtacgagtgacagctgcagatgccttcctggacttgatcaggaacatgttccctccaaatctggtagaagcctgctttaaacagtttaaaaccaactatgagaagagaagctttaaagtgcccatccaggccaacgaaacgcttgtgggtgctgtgataaacaatgtgtctgaggccatggagactcttacccgaatcacagaggagctggtcccagttccaggatctgtgaatggagtcaatgccctgggtctagttgtcttctccatgtgcttcggttttgtgattggaaacatgaaggaacaggggcaggccctgagagagttctttgattctcttaacgaagccatcatgagactggtagcagtaataatgtggtatgcccccgtgggtattctcttcctgattgctgggaagattgtggagatggaagacatgggtgtgattggggggcagcttgccatgtacaccgtgactgtcattgttggcttactcattcacgcagtcatcgtcttgccactcctctacttcttggtaacacggaaaaacccttgggtttttattggagggttgctgcaagcactcatcaccgctctggggacctcttcaagttctgccaccctacccatcaccttcaagtgcctggaagagaacaatggcgtggacaagcgcgtcaccagattcgtgctccccgtaggagccaccattaacatggatgggactgccctctatgaggctttggctgccattttcattgctcaagttaacaactttgaactgaacttcggacaaattattacaatcagcatcacagccacagctgccagtattggggcagctggaattcctcaggcgggcctggtcactatggtcattgtgctgacatctgtcggcctgcccactgacgacatcacgctcatcatcgcggtggactggttcctggatcgcctccggaccaccaccaacgtactgggagactccctgggagctgggattgtggagcacttgtcacgacatgaactgaagaacagagatgttgaaatgggtaactcagtgattgaagagaatgaaatgaagaaaccatatcaactgattgcacaggacaatgaaactgagaaacccatcgacagtgaaaccaagatgtagactaacataaagaaacactttcttgagcaccaggtgttaaaaaccattataaaatctttccatctcattacagctcattcgctccagcaagcccgtcatcttccctttcctcccttctgataagactggaaaatagtcctccaaaacacaagggaggattttgggtggccaaagtgtacaattttcatcccacaattgaaatttttaaatcatttcatgttagtcttaccgaataaggtaccaagatcacaaatagtgttgatcagatcttacaagtttatgtggcacacaatcctataaatgtgatttttttatataagttaaagagacaaatagtaggctaaaaacattttaaaatcaacttttgaaatttaaaaatctttcagaatacaattcagttttagtttcaaaatgttaacaacttgaattacaaccggttatcagttggacagtaagattttatccctttctcttctgactggtatacctatttcattagtagctaggtgcacatatacatctagcacagctgtgaggacagacagaaggcaaagtttccatgtggccttgagcaagtcccatctcacctctaggcctcagtgtcctcatctataaaatgagggacttccctagaagtcttcatggtctcttccagcccagacatcctgtgatgtcatgaaagcacctgccctctgtttcccctcagaacaccctgtaccatccatggagcacgaggccttcagaaaagacacttcaatgggagtgaacatttctaactaaggacaggatggctgtgtgtggtggtcaccaggtcctgtgagcaaagtgcaggttatgcaagtcgccaggcaggaggccattccaggagtgggattattcatcaaactctttgcccagttcatcccaatgggggaagtattcccttctttcctactctgggaagaatgtctcctgccactcctcaactgatgatagacttcgaaaacagatgagaagactagcagctagcaagggtgcttgtggtcacactgtggaacactaaagagctaggaaagagttgagcacaggcaacattacaaacaaaggatttgaaaacaccaagagtacaggtcttctttaaggaagaataaaaaagaagaggttcatttttctggctttttttttcacctgaaacactttttctcgagtccaaaatcattccccccgtgaagtctgcttaccaaaacataagacgacttatatatttgaaagaagtcaaatgaatgagctctctaatagaagtccatgagttgagtgggtatttcttatttgaaagtgtttttctttaatcaaaagtccttagaatgagggaaacaaaatatttatttgttttggaatcccacttatcaaatcattcaaaactttcagctggagtggggtttgcttttgttttgtttgtgtccataagagaaatggtagaagatgaatcagtatgaagacactgtcaatgaggttatgagaaaaaaacagcaggggcattagtttcaggcaaggcagctcccaggtttagagattaatttttaccccctaaggaatatccagtcaaagacgctgagtgggagctgtcaggcagtagcagctgtgtttgagtttctggctgaaaatggtgaagaatggacttaattatgctaacaaactgaaaaatctagacatagatcctctgatatacaattagagatatttttatatagaccccaagcattctgtgcataaaagttaacattaggctgtggtgcagtaaccatttaatgtcgaggctctatttcggaaatacactacaaatgttaaagtacgtggctgtcctcttaagacactagtagagcaaagacttaatcatatcaacttaattctgttacacaatatgtgttttttaatatactaaccatttcttatggaaaggtcctgtggggagcccatcctctcgccaagccatcacaggctctgcatacacatgcactcagtgtggactgggaagcattactttgtagatgtattttcaataaagaaaaaaatagttttacattaaaaaaaaaaaaaaaaaaaa

SEQ ID NO: 104 - protein, 542 aa, Homo sapiens
MTKSNGEEPKMGGRMERFQQGVRKRTLLAKKKVQNITKEDVKSYLFRNAFVLLTVTAVIVGTILGFTLRPYRMSYREVKYFSFPGELLMRMLQMLVLPLIISSLVTGMAALDSKASGKMGMRAVVYYMTTTIIAVVIGIIIVIIIHPGKGTKENMHREGKIVRVTAADAFLDLIRNMFPPNLVEACFKQFKTNYEKRSFKVPIQANETLVGAVINNVSEAMETLTRITEELVPVPGSVNGVNALGLVVFSMCFGFVIGNMKEQGQALREFFDSLNEAIMRLVAVIMWYAPVGILFLIAGKIVEMEDMGVIGGQLAMYTVTVIVGLLIHAVIVLPLLYFLVTRKNPWVFIGGLLQALITALGTSSSSATLPITFKCLEENNGVDKRVTRFVLPVGATINMDGTALYEALAAIFIAQVNNFELNFGQIITISITATAASIGAAGIPQAGLVTMVIVLTSVGLPTDDITLIIAVDWFLDRLRTTTNVLGDSLGAGIVEHLSRHELKNRDVEMGNSVIEENEMKKPYQLIAQDNETEKPIDSETKM

SEQ ID NO: 105 - DNA, 4611 bp, Homo sapiens
ccccgtctgcgtccgcgttcgcggctcccgtttgcatcatctccagccggcggctgctccagggaggctgggcgcgatcctctccgcccgcggctccaacccgcactctgcgcctctcctcgcctttctcgcacctgctcctgcgccaggcccggagacccccggggcggcttcccagaacctgcggagcacaactggccgaccgacccattcattgggaaccccgtcttttgccagagcccacgtcccctgccacctctagctcggagcggcgtgtagcgccatggagaagagcaacgagaccaacggctaccttgacagcgctcaggcggggcctgcggccgggcccggagctccggggaccgcggcgggacgcgcacggcgttgcgcgggcttcctgcggcgccaagcgctggtgctgctcaccgtgtccggggtgctggcgggcgcgggcctgggcgcggcgttgcgcgggctcagcctgagccgcacgcaggtcacctacctggccttccccggcgagatgctgctccgcatgctgcgcatgatcatcctgccgctggtggtctgcagcctggtgtcgggcgccgcctcgctcgatgccagctgcctcgggcgtctgggcggcatcgctgtcgcctactttggcctcaccacactgagtgcctcggcgctcgccgtggccttggcgttcatcatcaagccaggatccggtgcgcagacccttcagtccagcgacctggggctggaggactcggggcctcctcctgtccccaaagagacggtggactctttcctcgacctggccagaaacctgtttccctccaatcttgtggttgcagctttccgtacgtatgcaaccgattataaagtcgtgacccagaacagcagctctggaaatgtaacccatgaaaagatccccataggcactgagatagaagggatgaacattttaggattggtcctgtttgctctggtgttaggagtggccttaaagaaactaggctccgaaggagaagacctcatccgtttcttcaattccctcaacgaggcgacgatggtgctggtgtcctggattatgtggtacgtacctgtgggcatcatgttccttgttggaagcaagatcgtggaaatgaaagacatcatcgtgctggtgaccagcctggggaaatacatcttcgcatctatattgggccatgttattcatggaggaattgttctgccacttatttattttgttttcacacgaaaaaacccattcagattcctcctgggcctcctcgccccatttgcgacagcatttgctacctgctccagctcagcgacccttccctctatgatgaagtgcattgaagagaacaatggtgtggacaagaggatcagcaggtttattctccccatcggggccaccgtgaacatggacggagcagccatcttccagtgtgtggccgcggtgttcattgcgcaactcaacaacgtagagctcaacgcaggacagattttcaccattctagtgactgccacagcgtccagtgttggagcagcaggcgtgccagctggaggggtcctcaccattgccattatcctggaggccattgggctgcctactcatgacctgcctctgatcctggctgtggactggattgtggaccggaccaccacggtggtgaatgtggaaggggatgccctgggtgcaggcattctccaccacctgaatcagaaggcaacaaagaaaggcgagcaggaacttgctgaggtgaaagtggaagccatccccaactgcaagtctgaggaggagacatcgcccctggtgacacaccagaaccccgctggccccgtggccagtgccccagaactggaatccaaggagtcggttctgtgatggggctgggctttgggcttgcctgccagcagtgatgtcccaccctgttcacccagccgccagtcatggacacagggcactgcccttgccaacttttaccctcccaagcaatgctttggcccagtcgctggcctgaggcttacctctcggcactggcattgggctccccagccggaactggttaccaaggacaaggacactctgacattcggcttgatccatgtccaggtgcaactgtgtgtacaccagggatctgtttggaaacaaccccttgagctgccaggctcaagaaatcatggactcacagggtcctgtgtggttacatcttggaaaaaatgcagatgtatttcactctccccggtcagctctgcatcaggtgttttctgagcaaaccaagggggtttatagtcatctgtcgcattgcctcgagttgcagtaattgaaaaaatgctcaaattcttagccatggctggcctttgctgagctgggactcaggtgtttaaagagtttgtgctatagctaggtgtggatagcttctgatccctgggttctgggagactgcaggtgccgcacattgtcaagttagaaatactccaggtgggtgttagcactgtggtggtctctggtccacagccttaggtaaacaacttagattctgaggtcaaagaaaaaaggagagggaatgcagccttgtgggggagaagcggggcagagggttctctaatctaatcaggacaggacaggtttcacatacaattgtcccagttcgcatcccagccctggggcacttttctgcttccttccagaggcctgggcctctgataacactttggctttttctccattcacgctgatttggcaaaaggccagagatgggcctccttccctggggaggtgtgatgtagttatcacattcaggacccttgttgatttatcatctattatttgaattcaactggacactctgtaaaatgctgcactgcagcaaaaacaaaaccaccaccaccccagagaaaaccatgtactaattggagtggggtacccccattcacaggttcccaggtcccctggctttggctgatttcaaaatatagagccctttcttgccagtacatccaagtttaaaattatcagcgaaatggtccatgtttttccaattacctgctgacacggttctaagctaagtgaaggggaagatctgagagcgtgctgtttgtggctgttgatgcatattcgtgatgtaacaggtcctggggcctcactttaccccatttgtaaaatggggctaatgtcacctgcctcttacctacctcagagggatttggtgaagcaaactgttaatcttcgaaaacgaccatttcacttcttggatatcaagtgctaacccagtatgttcttcttttttatgtaagggacagctttctccacagagtcctttctgctggtgaggacagcatttctgagcagggctttgttctctatgtgcattaggacttttatcatgcccttgttctgtgtgtagttacttgacagcatcaaatgccgcctcttcctaatgtccttcaagttttcatgaactagcaaccccaccttccaccatggttctgggcgcctgattttgctgtgactcccagacccagccactgtttctgccaccctgtaacaggccattaaagctccccagtgttcagcctccttcactcccttgttttccctgttgctatgtgtcacctgggccctacagacaggggcacacgcttatggatgtgtgtaccattgagatgagaatgggtagatggaacggagaccatcaagccacacccccttcttaaaactggggacatgagcctgagcagaaagggtgaagaagagccatgggacacagagttgacccagccagggggaaagcccagctctctttaaaccagctaagccattccagtctcctgtgaagccaaaagggaccaggaaccgtgcaaaggaaactggaaacttttccccgctgggtagagcatgttgctgatactcttctgttttcaagggaaacaatcacattgtttgattccaaatggtaaatgaacactcactattcttcaggcttcagtaaatctttttttcttccttcatatatatatacacaacacacacacacatatgtatatctatacacacatgtgtgttgtgtatatgcatgtgtgtgtgtgcgtgtgtgtatagttttagctccaagccaagcaagtttgtgtttggatagaggggaacttaactattaactacaagttgtatgtctgtggtatcttgattttcccatttctaaagatgaatttcacaaagccataaagcgtgaaattagagctggacttaagactcattggccgaccatcctgtgtcctggcctggccctgcagtaagaagcgtgtctgggtctggagaagggtgcttccgagagtgtgcaggtggcccttccccttggaggcgagaagagagaatgtgctgtctatcttcctggttttcagtccacagagtcggtagaccaggggttacgtgactggggaaaatctcacatctccttgtctgaaaacatttcccctgctgttctctttctaacatgttgtggtaaatctgttcagatactgctcatctgactgttttgtacatgtgacaattgccttaaaacctagcacagtcctcagaaatgaataccgtgtttccactggaaaaaaaaaaaa

SEQ ID NO: 106 - protein, 532 aa, Homo sapiens
MEKSNETNGYLDSAQAGPAAGPGAPGTAAGRARRCAGFLRRQALVLLTVSGVLAGAGLGAALRGLSLSRTQVTYLAFPGEMLLRMLRMIILPLVVCSLVSGAASLDASCLGRLGGIAVAYFGLTTLSASALAVALAFIIKPGSGAQTLQSSDLGLEDSGPPPVPKETVDSFLDLARNLFPSNLVVAAFRTYATDYKVVTQNSSSGNVTHEKIPIGTEIEGMNILGLVLFALVLGVALKKLGSEGEDLIRFFNSLNEATMVLVSWIMWYVPVGIMFLVGSKIVEMKDIIVLVTSLGKYIFASILGHVIHGGIVLPLIYFVFTRKNPFRFLLGLLAPFATAFATCSSSATLPSMMKCIEENNGVDKRISRFILPIGATVNMDGAAIFQCVAAVFIAQLNNVELNAGQIFTILVTATASSVGAAGVPAGGVLTIAIILEAIGLPTHDLPLILAVDWIVDRTTTVVNVEGDALGAGILHHLNQKATKKGEQELAEVKVEAIPNCKSEEETSPLVTHQNPAGPVASAPELESKESVL

SEQ ID NO: 107 - DNA, 2658 bp, Homo sapiens
aataaatatccgtgtagaaaatcagaacgactctttcaggccatctttaaaatgtcattggtaaaccatacttgatcctaaattcctgtacttcctcaggccatccgagcatgaaacgctgtcacctacccacatccgctggctgtgacgcttgtcaaagtgttctctatcggctgcatgcctagaccaccaaagcgttctgaccggacagtgtcactggagaaggcggcgcgacatgtccagggcgcagatctgggctctggtgtctggtgtcggagggtttggagctctcgttgctgctaccacgtccaatgagtggaaagtgaccacgcgagcctcctcggtgataacagccacttgggtttaccagggtctgtggatgaactgcgcaggtaacgcgttgggttctttccattgccgaccgcattttactatcttcaaagtagcaggttatatacaggcatgtagaggacttatgatcgctgctgtcagcctgggcttctttggttccatatttgcgctctttggaatgaagtgtaccaaagtcggaggctccgataaagccaaagctaaaattgcttgtttggctgggattgtattcatactgtcagggctgtgctcaatgactggatgttccctatatgcaaacaaaatcacaacggaattctttgatcctctctttgttgagcaaaagtatgaattaggagccgctctgtttattggatgggcaggagcctcactgtgcataattggtggtgtcatattttgcttttcaatatctgacaacaacaaaacacccagatacacatacaacggggccacatctgtcatgtcttctcggacaaagtatcatggtggagaagattttaaaacaacaaacccttcaaaacagtttgataaaaatgcttatgtctaaaagagctcgctggcaagctgcctcttgagtttgttataaaagcgaactgttcacaaaatgatcccatcaaggccctcccataattaacactcaaaactatttttaaaatatgcatttgaagcatctgttgattgtatggatgtaagtgttcttacatagttagttatatactaatcattttctgttgtggctttctataaaaaataaacagtttatttacaggatttgtaaaatgttttctacatttatatagaacatgaaaagcatttagtaccaaaggttcaagaagtattcgtactctagcctttttaatcattcatagatagaagtctttgtacccactccttatgtttcttttcattcataaacaggtgtataaggaacaatgtcttataaacagcatgggggcaatctgagaatattcctcaaaaggtgtccaggttaaatagacatgttactggctgcacacaggcaaattctagtttgttttttttaagtattctacaacatttatttaaaaaggtaaatctttttgttgaagcagcaagttatctggtagaacttaacttctacaggatcagagaggatcttgctcattcatggccatatccacatgcccatggccactcagtagattgttgaaaaagcaaagccacaccattctctttgatgtatgcagagagttacgtagcaggggatgttctctgatttattccactggcaccattagtgaatatttagttgttttcataaacgatgctgtgatgaagactcatgtacatatttagcaaattttggtttcttacatgtgcctgtcatgactgtaattcattatgactgctccaggaagggctaatggggccaatatattattgcctgtcatgtggcacatccatgttaaggggctgaggcgtccctggcacggaatgcagagccctgagctagggcatcagcagaagctgagatagagatattggtcatggttgactgaggagccaattaaaacctgtttatgcctagtgttccattattggaacactaagcatgtgggagttatttatatcctactgctcaaggtcatcgccaaggtgtgattggaaaaattcaaaaaattgcaacctcaggcataaatgggttaaggacatcccaagcccaagtggtacgtgcctcactcagaactgacgggccgagttctatctaggtgtgtcttccagaacctgtttacggctaactggataactgagagacttgtcatttctaaagacatttaagttgctccagggatttctgaaaaaagacacaggcttcttcctagagccagccctatataacatgcccacaagggcaacagttatcacagttcatacacacctttcatgtcctgtctcactcactcctcacagccatcctaggagatacatattgttttcatcctgcatttacagaaaaagaaatgaaaacagagagcttaaataatttgccacagtaatgtcgaaactaggcctttgaaccaaggcagtctagggtaaaatatagtttcaaagtatgaataagaattggtatttgtgttatctttgagtaagaaactgtccgatatgaatcacaacgtgggtgaatgtagtattttcctgaagtgtgaaagacttaaaaaaaagaatcacattgttcagaggtgctcaatggaaagaaaaggaaatgaacaagtttgttaaaagataaaaaataaaaaaaattccatacct

SEQ ID NO: 108 - protein, 226 aa, Homo sapiens
MSRAQIWALVSGVGGFGALVAATTSNEWKVTTRASSVITATWVYQGLWMNCAGNALGSFHCRPHFTIFKVAGYIQACRGLMIAAVSLGFFGSIFALFGMKCTKVGGSDKAKAKIACLAGIVFILSGLCSMTGCSLYANKITTEFFDPLFVEQKYELGAALFIGWAGASLCIIGGVIFCFSISDNNKTPRYTYNGATSVMSSRTKYHGGEDFKTTNPSKQFDKNAYV

SEQ ID NO: 109 - DNA, 6772 bp, Homo sapiens
agctgcgggcggctccagctgcccccagatgtgggctgggcggctcgcggggaactttcgcgccggctgcgagtgcggggccccggctgcagtccggctgccatggatccgccggcgggagccgctcgccgcctgctctgccccgcgctgctgctgctgctgctgctgctgccgccgccgctcctgccgccgccgccgccgcccgcgaacgccaggctcgccgccgccgccgaccccccaggcgggcccctggggcacggagcggagcgcatcctggcggtgcccgtgcgcactgacgcccagggccgcttggtgtcccacgtggtgtcggcagctacgtccagagcaggggtacgagcccgcagggccgccccggtccggaccccgagcttccccggaggcaacgaggaggagcctggcagtcacctcttctacaatgtcacggtctttggccgagacctgcacctgcggctgcggcccaacgcccgcctcgtggcgcccggggccactatggagtggcagggcgagaagggcaccacccgcgtggagcccctgctcgggagctgtctctacgtcggagacgtggccggcctagccgaagcctcctctgtggcgctcagcaactgcgatgggctggctggtctgatccggatggaggaggaggagttcttcatcgaacccttggagaaggggctggcggcgcaggaggctgagcaaggccgtgtgcatgtggtgtatcgccggccacccacgtcccctcctctcggggggccacaggccctggacacaggggcctccctggacagcctggacagcctcagccgcgccctgggcgtcctagaggagcacgccaacagctcgaggcggagggcacgcaggcatgctgcggacgatgactacaacatcgaggtcctgctgggcgtggatgactctgtggtgcagttccacgggaaggagcacgtacagaagtacctgctgacactcatgaacattgtcaatgaaatctaccatgacgagtccttgggtgcccacatcaacgtggtcctggtgcggatcatcctcctgagctatggaaagtccatgagcctcatcgagatcgggaacccctctcagagcctggagaatgtctgccgctgggcctacctccagcagaagccagacacgggccacgatgaataccacgatcacgccatcttcctcacacggcaggactttgggccttccggcatgcaaggctatgctcctgtcaccggcatgtgccatccggtccgcagctgcaccctgaaccatgaggacggcttctcctcagcgtttgtggtggcccatgagactggccacgtgctgggcatggagcacgacgggcagggcaaccgctgtggcgacgaggtgcggctgggcagcatcatggcgcccctggtgcaggccgccttccaccgcttccactggtcccgctgcagccagcaggagctgagccgctacctgcactcctatgactgcctgctggatgaccccttcgcccacgactggccggcgctgccccagctcccgggactgcactactccatgaacgagcaatgccgctttgacttcggcctgggctacatgatgtgcacggcgttccggacctttgacccctgcaagcagctgtggtgcagccatcctgacaacccctacttttgcaagaccaagaaggggccccccttggacgggactatgtgtgcacctggcaagcattgttttaaaggacactgcatctggctgacacctgacatcctcaaacgggacggcagctggggcgcttggagtccgtttggctcctgctcacgtacctgtggcacgggcgtgaagttcaggacccgccagtgtgacaacccacacccggccaacgggggccgcacctgctcgggccttgcctacgacttccagctctgcagccgccaggactgccccgactccctggctgacttccgcgaggagcagtgccgccagtgggacctgtacttcgagcacggcgacgcccagcaccactggctgccccacgagcaccgggatgccaaggagagatgccacctgtactgcgagtccagggagaccggggaggtggtgtccatgaagcgcatggtgcatgacgggacgcgctgctcctacaaggacgccttcagcctctgtgtgcgcggggactgcaggaaggtgggctgtgacggtgtgatcggctccagcaagcaggaagacaagtgtggcgtgtgcggaggggacaacagccactgcaaagtggtcaagggcacgttcacacggtcacccaagaagcatggttacatcaagatgtttgagatccctgcaggagccagacacctgctcattcaggaggtagacgccaccagccaccatctggccgtcaagaacctggagacaggcaagttcatcttaaatgaagagaatgacgtggatgccagttccaaaaccttcattgccatgggcgtggagtgggagtacagagacgaggacggccgggagacgctgcagaccatgggccccctccacggcaccatcaccgttctggtcatcccggtgggagacacccgggtctcactgacgtacaaatacatgatccatgaggactcactgaatgtcgacgacaacaacgtcctggaagaggactctgtggtctacgagtgggccctgaagaagtggtctccgtgctccaagccctgtggcggagggtcccagttcaccaagtatggctgccgccggaggctggaccacaagatggtacaccgtggcttctgtgccgccctctcgaagcccaaagccatccgcagagcgtgcaacccacaggaatgctcccagccagtgtgggtcacaggcgaatgggagccatgtagccagacctgtgggcggacaggcatgcaggtgcgctccgtgcgctgcattcagccgctacacgacaacaccacccgctccgtgcacgccaagcactgcaatgacgcccggcccgagagccgccgggcctgcagccgcgagctctgccctggtcgttggcgagccgggccctggtcccagtgctcagtaacctgtggcaacggcacccaggagcggccagtgctctgccgcaccgcggacgacagcttcggcatctgccaggaggagcgtcctgagacagcgaggacctgcaggcttggcccctgtccccgaaacatctcagatccctccaagaagagctacgtagttcagtggctgtcccgcccggaccccgactcgcccatccggaagatctcgtcaaagggccactgccaaggcgacaagtcaatattctgtaggatggaagtcttgtcccgctattgctccatcccaggctacaacaagctgtgctgcaagtcctgtaacctgtacaacaacctcaccaacgtggagggcaggatagagccaccgcctgggaagcacaacgacattgacgtgttcatgcctaccctcccagtgcccactgtagccatggaggtgcggccatcaccaagcacccccctggaggtccctctcaatgcctccagcaccaatgccacagaggatcacccagaaaccaatgccgtagatgaaccctacaaaatccatggcctggaagatgaagtccagccacccaacctaatccctcgacgaccgagcccctatgaaaagaccagaaaccaaagaatccaagagctcattgatgagatgcggaagaaagagatgctcggaaagttctaataaaatggaaagatagcatccctagcatttttttcttgcttatagagatattccatgggatagcaaatcctgtgtcatggagatgaagtcaaaattcctgattccaaaaggttttgagaaaacaaagagggggaatgacgtaagaaagataggcatgagcatgtggtaactaggttagcacgtgtgcttcccagcccaggagcgaccaaatactgtggtggcgtcaggtgtgcagtggagaggaatatagaggctgtatggcctccctcagtgagggcagggcaagagggatcactctgagagaacaaaaataggccccaagttgctaagcagtgattgggaaccttcctttccttggcggagatgcatgacattccctaccgatccccagacacagcctgtgggactcttaggagaaatggtgatttactgaataactgacccgttgccgagatgagtacaatgaagtggaggtgatgaactcaaatcgtcttccagggccaggcggctgaccggggtgagcgtagtggcccgctggggaccatggccgccctgacagccacacccacctggagctgacttggttctggctgttgctgccactgtgaaatctgtatctctctccatctctgctctactatccccggccttgccagacagtgttctttttcggaagaagtctagatttttgcatgaaaaaaactcaatctttaaaggtcgactcagaacattttaaggaggcctccacttggtctgatgcagtcttgctaattaagaactaaaggccttctgaccttcttggtgctcatgctgtacggcatctgaatgtctcgaccgagtctgagccgtgcagctgtcctccacctgcgaaagtaatgagaatcctatcacgggacataaggataggtctaaacagggtccatgccaagaaaacagtggggtgctctcccaggcctctcccctgtccactaaccctggccttgccggctgccttccaggctctgggggaagagctcctgcattcttccctggccaccttggctccagggctccccagagagcctcttccctccccaagtacctgagaaagatgagagaggcacgtgctctgctgggaaggtccagtgagcggttcaagggcctggaatctccctacggccaagtctaagggttctgggattctgggctttgtgggctttgcttgcttgctgggaatgggctttccctgtcccgccctgccccacctcgcctctgtctctcagaagctccagaacccagcagtgacctgcaaaatgtggcctctgatgggggcttagggtgggagatggggagagcctacattgtcttttgctccttgaaaactttaatagctcctattttccagagaatggtgctttgtgagcaacatgcgagtaagagagaaataggaggaagggggagtaggggcggatgggagaagagtggctcatttttacctctcactgccttgacattttgtgaacgtgaagcttaaactttctgggcttacaagacccaggggcacgtcagctccttagatgggctcagcctgacacataattcttaaacctttcctgtttaagaaacttctagaggctgtgtactctcaccaatcctcttcgagaatttgttcatgtgtatttccccattatatggatgaggctcaggataacagcatagtggctaccttctactgagttttgaggtgctaataagtatgtttgtctgaggctgcacatgtgggtggctctgtgtgtatgatccaagggacaaaatgacgatgtaggaaccagcaagaacggaatctgggctgatgcttcagtctccacctgggtgatggctagcctcccgccctccaccaccgcatcccacacgtgctgcgcactgtccccgtgtctcctggagaaccaaactggagaaaacctttctgagtatctctcatagtaccccttccttaagaagatgtggtttagagcatgtgtgcaatcctgcctctgtaattaggaaacggagcccgaggctttccattgttggttgaacccaggacagctggtgctattcacaggctgaagaactgggcagttcttacttgggtctgtcctaggatgtggaggaagttcaggactaacgctaggcagagagtatgactcggtttacccagcctaggggcctctggatgggaacactccattccaagatctcagcagagcagggcttcctggcttgaggctggaagcctttgggaagaggcccagctgggacattccctgggcacctgtcttccgctgaagggagcaaggtgccctctgggactgacagccatgaccctctgtgccatcctcaatccttgagccatatatcaagagtcctctagagccggatggtcctcaaaagtctgtccaaggaatgccaacgttcaccgggctctgagaaacgacgcaaatctctgagctggggaccacttggagaaccggcttagtaacagtcctgatcttcgcaagccagcttcttctgcatctgaggggctcctggcgcccagaggaggcagacagatgtcttctagctgagtttctaaccgcatgatgagactcagaccttccgctgcactagaaaatctgcaacagtgtccctgagtcacttctccttagtgggcagactcgtgttagatttgtggaacccagctctctgatttactccttttggaaaacccatggaatttcatgtataaggctttcatttgtattttaaggtttttctgtttgttttgagtatatacatggtgctcaatagcaacatcttagcagatgaagcagtttatgattccactccctcctgtatgacaggtagccactatactgaatcaaggtgctgaactcaaatcacaaaattctggcttaccgatacaacaaccaatacatctttgttctgtaatgtaaaatttgactccttacttttataacttattaaagttaaaatgtctgtgtttttgcaaatcatgaaaaaaaaaaaaaaaaaa

SEQ ID NO: 110 - protein, 1211 aa, Homo sapiens
MDPPAGAARRLLCPALLLLLLLLPPPLLPPPPPPANARLAAAADPPGGPLGHGAERILAVPVRTDAQGRLVSHVVSAATSRAGVRARRAAPVRTPSFPGGNEEEPGSHLFYNVTVFGRDLHLRLRPNARLVAPGATMEWQGEKGTTRVEPLLGSCLYVGDVAGLAEASSVALSNCDGLAGLIRMEEEEFFIEPLEKGLAAQEAEQGRVHVVYRRPPTSPPLGGPQALDTGASLDSLDSLSRALGVLEEHANSSRRRARRHAADDDYNIEVLLGVDDSVVQFHGKEHVQKYLLTLMNIVNEIYHDESLGAHINVVLVRIILLSYGKSMSLIEIGNPSQSLENVCRWAYLQQKPDTGHDEYHDHAIFLTRQDFGPSGMQGYAPVTGMCHPVRSCTLNHEDGFSSAFVVAHETGHVLGMEHDGQGNRCGDEVRLGSIMAPLVQAAFHRFHWSRCSQQELSRYLHSYDCLLDDPFAHDWPALPQLPGLHYSMNEQCRFDFGLGYMMCTAFRTFDPCKQLWCSHPDNPYFCKTKKGPPLDGTMCAPGKHCFKGHCIWLTPDILKRDGSWGAWSPFGSCSRTCGTGVKFRTRQCDNPHPANGGRTCSGLAYDFQLCSRQDCPDSLADFREEQCRQWDLYFEHGDAQHHWLPHEHRDAKERCHLYCESRETGEVVSMKRMVHDGTRCSYKDAFSLCVRGDCRKVGCDGVIGSSKQEDKCGVCGGDNSHCKVVKGTFTRSPKKHGYIKMFEIPAGARHLLIQEVDATSHHLAVKNLETGKFILNEENDVDASSKTFIAMGVEWEYRDEDGRETLQTMGPLHGTITVLVIPVGDTRVSLTYKYMIHEDSLNVDDNNVLEEDSVVYEWALKKWSPCSKPCGGGSQFTKYGCRRRLDHKMVHRGFCAALSKPKAIRRACNPQECSQPVWVTGEWEPCSQTCGRTGMQVRSVRCIQPLHDNTTRSVHAKHCNDARPESRRACSRELCPGRWRAGPWSQCSVTCGNGTQERPVLCRTADDSFGICQEERPETARTCRLGPCPRNISDPSKKSYVVQWLSRPDPDSPIRKISSKGHCQGDKSIFCRMEVLSRYCSIPGYNKLCCKSCNLYNNLTNVEGRIEPPPGKHNDIDVFMPTLPVPTVAMEVRPSPSTPLEVPLNASSTNATEDHPETNAVDEPYKIHGLEDEVQPPNLIPRRPSPYEKTRNQRIQELIDEMRKKEMLGKF

SEQ ID NO: 111 - DNA, 2082 bp, Homo sapiens
aaggaataaagttgctgattcattcctttacactgaaaccctttgttgtgccctcctcttccttcctctttatagggagacactctgagaaagagcacattgtgggggcccactccatgtgatgtttgcttggttgcctgttcccttttctacctgcagagcacggttcccataagggcggcgagatcagcctcctgtctcatctggaagaccaccactctggggtctcagaggaatgatggaagccttggggtttctaaaattggaagtgaatggccccatggtgacggtggccctgtcagtggctctcttggccctcctgaaatggtactccacatcagcattctcaagactggagaagttaggcctcagacatcccaagccttctcctttcattggaaacttgacatttttccgccagggtttttgggaaagccaaatggagctcagaaagctgtatggacctctgtgtgggtactatcttggtcgtcggatgtttattgttatttctgagccagacatgatcaagcaggtgttggttgagaacttcagtaactttaccaacagaatggcgtcgggtttggagttcaagtcggtagccgacagcgttctgtttttacgtgacaaaagatgggaagaggtcagaggtgccctgatgtctgctttcagtcctgaaaagctgaacgagatggttcccctcatcagccaagcctgcgaccttctcctggctcatttaaaacgctatgcggaatctggggacgcatttgacatccagaggtgctactgcaattacaccacagatgtggttgccagcgtcgcctttggcaccccggtggactcctggcaggcccctgaggatccctttgtgaaacactgcaagcgtttcttcgaattctgcatccccagacctatcctggttttactcttatcatttccatccataatggtcccactggcccggattttgcccaataagaaccgagacgaactgaatggcttttttaacaaactcattaggaatgtgattgccttgcgggaccagcaagctgccgaagagaggcggagagacttcctccaaatggtcctggatgcccgacattctgcaagtcccatgggcgtgcaagactttgacatcgtcagagacgttttctcctctactgggtgcaagccgaacccttcccggcaacaccagcccagccctatggccaggcctttgactgtggatgagattgtgggccaggccttcatcttcctcatcgctggctatgaaatcatcaccaacacactttcttttgccacctacctactggccaccaaccctgactgccaagagaagcttctgagagaggtagacgtttttaaggagaaacacatggcccctgagttctgcagcctcgaggaaggcctgccctatctggacatggtgattgcagagacgctgaggatgtacccgccagctttcagattcacacgggaggcagctcaggactgcgaggtgctggggcagcgcatccccgcaggcgctgtgctagagatggccgtgggtgccctgcaccatgaccctgagcactggccaagcccggagaccttcaaccctgaaaggttcacggctgaggcccggcagcagcaccggcccttcacgtacctgcccttcggggccggcccacggagctgcctcggggtgcgtctagggctgcttgaggtcaagttgacactgctccacgtgctgcacaagttccggttccaagcctgccctgagacccaggtaccgctgcagctagaatccaaatctgccctaggtccaaaaaatggtgtctatatcaagatcgtatcccgctgacacagaaggctgccgggtggggggagggcacccccaaattcaaagaaaaccctaagtgtggatgttcagaattttggaaaaatgtcactgaagtgattgaaagagtgcctggcatgcaaggataagaggttctttacataacatttcctaaatgcttaataaacgtttgttgcacttggttttgacattgccaatggggtttgaaccagtgctctctctaaatgaaaaaaaaaaaaaaaaaa

SEQ ID NO: 112 - protein, 534 aa, Homo sapiens
MMEALGFLKLEVNGPMVTVALSVALLALLKWYSTSAFSRLEKLGLRHPKPSPFIGNLTFFRQGFWESQMELRKLYGPLCGYYLGRRMFIVISEPDMIKQVLVENFSNFTNRMASGLEFKSVADSVLFLRDKRWEEVRGALMSAFSPEKLNEMVPLISQACDLLLAHLKRYAESGDAFDIQRCYCNYTTDVVASVAFGTPVDSWQAPEDPFVKHCKRFFEFCIPRPILVLLLSFPSIMVPLARILPNKNRDELNGFFNKLIRNVIALRDQQAAEERRRDFLQMVLDARHSASPMGVQDFDIVRDVFSSTGCKPNPSRQHQPSPMARPLTVDEIVGQAFIFLIAGYEIITNTLSFATYLLATNPDCQEKLLREVDVFKEKHMAPEFCSLEEGLPYLDMVIAETLRMYPPAFRFTREAAQDCEVLGQRIPAGAVLEMAVGALHHDPEHWPSPETFNPERFTAEARQQHRPFTYLPFGAGPRSCLGVRLGLLEVKLTLLHVLHKFRFQACPETQVPLQLESKSALGPKNGVYIKIVSR

SEQ ID NO: 113 - DNA, 2240 bp, Homo sapiens
ggagggcagccagcagcttccccttctctgccctgctccaggcaccaggctctttccccttcagtgtctcagaggaggggacggcagcaccatggacccccgcttgtccactgtccgccagacctgctgctgcttcaatgtccgcatcgcaaccaccgccctggccatctaccatgtgatcatgagcgtcttgttgttcatcgagcactcagtagaggtggcccatggcaaggcgtcctgcaagctctcccagatgggctacctcaggatcgctgacctgatctccagcttcctgctcatcaccatgctcttcatcatcagcctgagcctactgatcggcgtagtcaagaaccgggagaagtacctgctgcccttcctgtccctgcaaatcatggactatctcctgtgcctgctcaccctgctgggctcctacattgagctgcccgcctacctcaagttggcctcccggagccgtgctagctcctccaagttccccctgatgacgctgcagctgctggacttctgcctgagcatcctgaccctctgcagctcctacatggaagtgcccacctatctcaacttcaagtccatgaaccacatgaattacctccccagccaggaggatatgcctcataaccagttcatcaagatgatgatcatcttttccatcgccttcatcactgtccttatcttcaaggtctacatgttcaagtgcgtgtggcggtgctacagattgatcaagtgcatgaactcggtggaggagaagagaaactccaagatgctccagaaggtggtcctgccgtcctacgaggaagccctgtctttgccatcgaagaccccagaggggggcccagcaccacccccatactcagaggtgtgaccctcgccaggccccagccccagtgctgggaggggtggagctgcctcataatctgcttttttgctttggtggcccctgtggcctgggtgggccctcccgcccctccctggcaggacaatctgcttgtgtctccctcgctggcctgctcctcctgcagggcctgtgagctgctcacaactgggtcaacgctttaggctgagtcactcctcgggtctctccataattcagcccaacaatgcttggtttatttcaatcagctctgacacttgtttagacgattggccattctaaagttggtgagtttgtcaagcaactatcgacttgatcagttcagccaagcaactgacaaatcaaaaacccacttgtcagttcagtaaaataatttggtcaaacaacagtctattgcattgatttataaatagttgtcagttcacatagcaatttaatcaagtaatcattaattagttaccccctatatataaatatatgtaatcaatttcttcaaatagcttgcttacatgataatcaattagccaaccatgagtcatttagaatagtgataaatagaatacacagaatagtgatgaaattcaatttaaaaaatcacgttagcctccaaaccatttaattcaaatgaacccatcaactggatgccaactctggcgaatgtaggacctctgagtggctgtataattgttaattcaaatgaaattcatttaaacagttgacaaactgtcattcaacaattagctccaggaaataacagttatttcatcataaaacagtcccttcaaacacacaattgttctgctgaagagttgtcatcaacaatccaatgctcacctattcagttgctctgtggtcagtgtggctgcataacagtggattccatgaaaggagtcattttagtgatgagctgccagtccattcccaggccaggctgtcgctggccatccattcagtcgattcagtcataggcgaatctgttctgcccgaggcttgtggtcaagcaaaaattcagccctgaaatcaggcacatctgttcgttggactaaacccacaggttagttcagtcaaagcaggcaacccccttgtgggcactgaccctgccactggggtcatggcggttgtggcagctggggaggtttggccccaacagccctcctgtgcctgcttccctgtgtgtcggggtcctccagggagctgacccagaggtggaggccacggaggcagggtctctggggactgtcggggggtacagagggagaaggctctgcaagagctccctggcaatacccccttgtgtaattgctttgtgtgcgacagggaggaagtttcaataaagcagcaacaagcttct

SEQ ID NO: 114 - protein, 262 aa, Homo sapiens
MDPRLSTVRQTCCCFNVRIATTALAIYHVIMSVLLFIEHSVEVAHGKASCKLSQMGYLRIADLISSFLLITMLFIISLSLLIGVVKNREKYLLPFLSLQIMDYLLCLLTLLGSYIELPAYLKLASRSRASSSKFPLMTLQLLDFCLSILTLCSSYMEVPTYLNFKSMNHMNYLPSQEDMPHNQFIKMMIIFSIAFITVLIFKVYMFKCVWRCYRLIKCMNSVEEKRNSKMLQKVVLPSYEEALSLPSKTPEGGPAPPPYSEV

SEQ ID NO: 115 - DNA, 790 bp, Homo sapiens
ggaaacctgagttaggtgtggctggagcgactcgagatgcgaggtgggcgggggcaggctgaaagttggagcaagcaggaagtgaactgagggccaccctgggaggaagccgactaggcgaattcacttactgaccggcctgggctgctctgagacatggaggaagccagtgaaggtggaggaaatgatcgtgtgcggaacctgcaaagtgaggtggagggagttaagaatattatgacccagaatgtggagcggatcctggcccggggggaaaacttggaacatctccgcaacaagacagaggatctggaagccacatctgagcacttcaagacgacatcgcagaaggtggctcgaaaattctggtggaagaacgtgaagatgattgtccttatctgcgtgattgtttttatcatcatcctcttcattgtgctctttgccactggtgccttctcttaagtaacagggaacctctcccacctgcccttctcttcagggacaaccctccataaatgtgtgccaagagggtctcctttcctgtcttcctctacagagaatgctgctcggtcctcctacccctcttcccgaggccctgctgccatgttgtatgccccagaaggtaccttggtcccccggaaggagagaaaaaagagagatggactgtggctgcatttcttgggtccttagagtgggctggagagacctagagggcccagcatgtggctgggaaactgttggtggccagtgggtaataaagacctttcagtatccctataaaaaaaaaaaaaaa

SEQ ID NO: 116 - protein, 100 aa, Homo sapiens
MEEASEGGGNDRVRNLQSEVEGVKNIMTQNVERILARGENLEHLRNKTEDLEATSEHFKTTSQKVARKFWWKNVKMIVLICVIVFIIILFIVLFATGAFS

SEQ ID NO: 117 - DNA, 2821 bp, Homo sapiens
gaaaaaagaaaatgtcagaggaatttgaagccaatactatggattctctggtagacatgccatttgctactgtagatattcaggatgactgtggaatcactgatgaacctcaaataaatttgaagagaagtcaagaaaatgaatgggtcaagagtgatcaagtaaagaagaggaaaaaaaagagaaaagattatcaacccaactatttcctgtccattccaatcaccaacaaagagattataaaaggaattaagatcctgcagaatgcaataatacaacaagatgagcgactggccaaagcaatggtcagtgatggttcctttcatattaccctgctggtgatgcaattattaaatgaagatgaagtaaacattggtattgatgctcttttggaattgaaaccattcatagaagaactcctccagggaaaacatttgactttgccctttcaagggattggtacttttggaaatcaggttggatttgtgaagctggcagaaggagatcatgtaaactcacttttggagatagcagagactgcaaataggacatttcaagaaaaaggcatcctggtaggagagagcagaagttttaaacctcatttgaccttcatgaagttgtcaaaatcaccgtggctccgtaagaatggagtgaaaaaaatagatcctgatttatatgaaaagtttatcagtcacagatttggagaagaaatattatatcgcatagatctttgctccatgctgaagaaaaaacaaagtaatggttattatcactgtgaatcttccattgtgattggtgaaaagaacggaggggagcccgatgacgctgaactagtaaggctcagtaagaggctggtggagaacgcggtgctcaaggctgtccagcagtatctggaggaaacacagaataaaaacaagccgggggaggggagctctgtgaaaaccgaagcagctgatcagaatggcaatgacaatgagaacaacaggaaatgagcccggaacgcaggcccccatgtctctgtgcaaagcctccctgcttccctctgctgagtctagggactgacttgcagcgtgctgtttaagttaagtttctctggtgcaatctgtgaagattgcctaatacttttcatgatcgatgtgttcgcattgctgaaacacaacagaagaaaaatggagtgctgggactggcagaggaaattaattgatgaaagaagaatggcccaagtttcattcgccctcagccacgcacaagggaaagggaactttgggttatgcctcctggacgcaaattaaaggccgagaaagaggccttgccatcaatggaatactgccatttatattgcttagcagggcatttgactactttatctgaggccagaactctcacacacagctatcaagtgctaagtttaaaataatcactgttggaattgtcatctgtacaattagtccataatgtttcatgtttgtcctaagtgtgctgttgctatgcagtgtgatctttatttatagtaaattatgtttcatgtaaatgatatatttttggtgaaatgcaaccttttctataaaatgtgggcaacattttaaagtttttttaaaatcctattttgataagtcagtatgccatatttaatgaaatgttattatataatttttttttcttaggcaagaaacctattggaattcgagacttaattaatgaagctttgcatcgagaaacgatgggtctgaagtccaaagtgaaacagataaaggaacttttattaaagcctgagactcaggccagaattaggagggagctttttgaaggaagacttattaacaacagtaattcagcaaatgacgttgatttcagcacaactttgacataagctctacattgcgattgtgacaacatagcttatgaaatcttttcagcttattaagtagctctttggtaaacaccaaagaagtttctgatagtgtctgcacaacagcaaaccaacatttggtgaggaattagcaatttcttgccaaagaaaattgattctgcccaattattttttgagctacacttgtgttttagaatatctgtttctgtaatattgagagttattttatagaaatgatttcttaattagctgttgtgagatatttctcgggtccttgcagaaaaaaacatacagactgtgaacaaatcattcacaaacagaataaaacagagccaacaacagtattttaagggtcacttgcctcctgttgacacaattgttgctaaatcaaaagaagcgttgtccaggtgtgtctacatctagtgttacttttaatgagaatttgaatgtttattgaacaatagtacttgaatgaacatttataaatgtaattattgcgatcactggttaagaatgttttatatatccttataatatttttcactgatcaaaatgttgttctgctttttcatttcttaaggaatacatgtttgggatttttattttttacgtgtccgaagataagctccaggtcttatcgtatcccttgccatctgaacttgtttgcactgcttctgtttgaaagagcatcttgaaaaacttccccggtatgatgattgttggtaacaactttttctatagtcattgatggagtagatcatgatggaggggaaatcactggagatcaaatatgtaaaatcatttcaaatataaaatccagtttactcatggattttagctattttttcactgggtaaattatactacatttatttacaaatgagtttatgcattttcatggctcttaataaacatattgttttcccttgaaaaaaaaaaaaaaaaaaaaaa

SEQ ID NO: 118 - protein, 326 aa, Homo sapiens
MSEEFEANTMDSLVDMPFATVDIQDDCGITDEPQINLKRSQENEWVKSDQVKKRKKKRKDYQPNYFLSIPITNKEIIKGIKILQNAIIQQDERLAKAMVSDGSFHITLLVMQLLNEDEVNIGIDALLELKPFIEELLQGKHLTLPFQGIGTFGNQVGFVKLAEGDHVNSLLEIAETANRTFQEKGILVGESRSFKPHLTFMKLSKSPWLRKNGVKKIDPDLYEKFISHRFGEEILYRIDLCSMLKKKQSNGYYHCESSIVIGEKNGGEPDDAELVRLSKRLVENAVLKAVQQYLEETQNKNKPGEGSSVKTEAADQNGNDNENNRK

SEQ ID NO: 119 - DNA, 5189 bp, Homo sapiens
ggactgcgaaaggagcagggttgcggagctagggctccagcctgcggccgcgcattcttgcgtctggccagccgcgagctctaagggtcggccccgcccggtccgcccccgcggctccctgccaggctctcgcgggcgcgctcggggtggggcctcgcggctggcggagatgcggccggggctgcgcggtggtgatgcgagcctgctgggcggcgcgccggggcagccggagccgcgcgccgcggcgctgtaatcggacaccaagagcgctcgcccccggcctccggccactttccattcactccgaggtgcttgattgagcgacgcggagaagagctccgggtgccgcggcactgcagcgctgagattcctttacaaagaaactcagaggaccgggaagaaagaatttcacctttgcgacgtgctagaaaataaggtcgtctgggaaaaggactggagacacaagcgcatccaaccccggtagcaaactgatgacttttccgtgctgatttctttcaacctcggtattttcccttggatattaacttgcatatctgaagaaatggcattccggacaatttgcgtgttggttggagtatttatttgttctatctgtgtgaaaggatcttcccagccccaagcaagagtttatttaacatttgatgaacttcgagaaaccaagacctctgaatacttcagcctttcccaccatcctttagactacaggattttattaatggatgaagatcaggaccggatatatgtgggaagcaaagatcacattctttccctgaatattaacaatataagtcaagaagctttgagtgttttctggccagcatctacaatcaaagttgaagaatgcaaaatggctggcaaagatcccacacacggctgtgggaactttgtccgtgtaattcagactttcaatcgcacacatttgtatgtctgtgggagtggcgctttcagtcctgtctgtacttacttgaacagagggaggagatcagaggaccaagttttcatgattgactccaagtgtgaatctggaaaaggacgctgctctttcaaccccaacgtgaacacggtgtctgttatgatcaatgaggagcttttctctggaatgtatatagatttcatggggacagatgctgctatttttcgaagtttaaccaagaggaatgcggtcagaactgatcaacataattccaaatggctaagtgaacctatgtttgtagatgcacatgtcatcccagatggtactgatccaaatgatgctaaggtgtacttcttcttcaaagaaaaactgactgacaataacaggagcacgaaacagattcattccatgattgctcgaatatgtcctaatgacactggtggactgcgtagccttgtcaacaagtggaccactttcttaaaggcgaggctggtgtgctcggtaacagatgaagacggcccagaaacacactttgatgaattagaggatgtgtttctgctggaaactgataacccgaggacaacactagtgtatggcatttttacaacatcaagctcagttttcaaaggatcagccgtgtgtgtgtatcatttatctgatatacagactgtgtttaatgggccttttgcccacaaagaagggcccaatcatcagctgatttcctatcagggcagaattccatatcctcgccctggaacttgtccaggaggagcatttacacccaatatgcgaaccaccaaggagttcccagatgatgttgtcacttttattcggaaccatcctctcatgtacaattccatctacccaatccacaaaaggcctttgattgttcgtattggcactgactacaagtatacaaagatagctgtggatcgagtgaacgctgctgatgggagataccatgtcctgtttctcggaacagatcggggtactgtgcaaaaagtggttgttcttcctactaacaactctgtcagtggcgagctcattctggaggagctggaagtctttaagaatcatgctcctataacaacaatgaaaatttcatctaaaaagcaacagttgtatgtgagttccaatgaaggggtttcccaggtatctctgcaccgctgccacatctatggtacagcctgtgctgactgctgcctggcgcgggacccttattgcgcctgggatggccattcctgttccagattctacccaactgggaaacggaggagccgaagacaagatgtgagacatggaaacccactgactcaatgcagaggatttaatctaaaagcatacagaaatgcagctgaaattgtgcagtatggagtaaaaaataacaccacttttctggagtgtgcccccaagtctccgcaggcatctatcaagtggctgttacagaaagacaaagacaggaggaaagaggttaagctgaatgaacgaataatagccacttcacagggactcctgatccgctctgttcagggttctgaccaaggactttatcactgcattgctacagaaaatagtttcaagcagaccatagccaagatcaacttcaaagttttagattcagaaatggtggctgttgtgacggacaaatggtccccatggacctgggccagctctgtgagggctttacccttccacccgaaggacatcatgggggcattcagccactcagaaatgcagatgattaaccaatattgcaaagacactcggcagcaacatcagcagggagatgaatcacagaaaatgagaggggactatggcaagttaaaggccctcatcaatagtcggaaaagtagaaacaggaggaatcagttgccagagtcataatattttcttatgtgggtcttatgcttccattaacaaatgctctgtcttcaatgatcaaattttgagcaaagaaacttgtgctttaccaaggggaattactgaaaaaggtgattactcctgaagtgagttttacacgaactgaaatgagcatgcattttcttgtatgatagtgactagcactagacatgtcatggtcctcatggtgcatataaatatatttaacttaacccagattttatttatatctttattcaccttttcttcaaaatcgatatggtggctgcaaaactagaattgttgcatccctcaattgaatgagggccatatccctgtggtattcctttcctgctttggggctttagaattctaattgtcagtgattttgtatatgaaaacaagttccaaatccacagcttttacgtagtaaaagtcataaatgcatatgacagaatggctatcaaaagaaatagaaaaggaagacggcatttaaagttgtataaaaacacgagttattcataaagagaaaatgatgagtttttatggttccaatgaaatatgttggggtttttttaagattgtaaaaataatcagttactggtatctgtcactgacctttgtttccttattcaggaagataaaaatcagtaacctaccccatgaagatatttggtgggagttatatcagtgaagcagtttggtttatattcttatgttatcaccttccaaacaaaagcacttactttttttggaagttatttattttagactcaaagaatataatcttgcactactcagttattactgtttgttctcttattccctagtctgtgtggcaaattaaacaatataagaaggaaaaatttgaagtattagacttctaaataaggggtgaaatcatcagaaagaaaaatcaaagtagaaactactaattttttaagaggaatttataacaaatatggctagttttcaacttcagtactcaaattcaatgattcttccttttattaaaaccagtctcagatatcatactgatttttaagtcaacactatatattttatgatcttttcagtgtgatggcaaggtgcttgttatgtctagaaagtaagaaaacaatatgaggagacattctgtctttcaaaaggtaatggtacatacgttcactggtctctaagtgtaaaagtagtaaattttgtgatgaataaaataattatctcctaattgtatgttagaataattttattagaataatttcatactgaaattattttctccaaataaaaattagatggaaaaatgtgaaaaaaattattcatgctctcatatatattttaaaaacactacttttgcttttttatttaccttttaagacattttcatgcttccaggtaaaaacagatattgtaccatgtacctaatccaaatatcatataaacattttatttatagttaataatctatgatgaaggtaattaaagtagattatggcctttttaagtattgcagtctaaaacttcaaaaactaaaatcattgtcaaaattaatatgattattaatcagaatatcagaatatgattcactatttaaactatgataaattatgataatatatgaggaggcctcgctatagcaaaaatagttaaaatgctgacataacaccaaacttcattttttaaaaaatctgttgttccaaatgtgtataattttaaagtaatttctaaagcagtttattataatggtttgcctgcttaaaaggtataattaaacttcttttctcttctacattgacacacagaaatgtgtcaatgtaaagccaaaaccatcttctgtgtttatggccaatctattctcaaagttaaaagtaaaattgtttcagagtcacagttccctttatttcacataagcccaaactgatagacagtaacggtgtttagttttatactatatttgtgctatttaattctttctattttcacaattattaaattgtgtacactttcattacttttaaaaatgtagaaattcttcatgaacataactctgctgaatgtaaaagaaaattttttttcaaaaatgctgttaatgtatactactggtggttgattggttttattttatgtagcttgacaattcagtgacttaatatctattccatttgtattgtacataaaattttctagaaatacacttttttccaaagtgtaagtttgtgaatagattttagcatgatgaaactgtcataatggtgaatgttcaatctgtgtaagaaaacaaactaaatgtagttgtcacactaaaatttaattggatattgatgaaatcattggcctggcaaaataaaacatgttgaattccccaaaaaaaaaaaaaaaa

SEQ ID NO: 120 - protein, 751 aa, Homo sapiens
MAFRTICVLVGVFICSICVKGSSQPQARVYLTFDELRETKTSEYFSLSHHPLDYRILLMDEDQDRIYVGSKDHILSLNINNISQEALSVFWPASTIKVEECKMAGKDPTHGCGNFVRVIQTFNRTHLYVCGSGAFSPVCTYLNRGRRSEDQVFMIDSKCESGKGRCSFNPNVNTVSVMINEELFSGMYIDFMGTDAAIFRSLTKRNAVRTDQHNSKWLSEPMFVDAHVIPDGTDPNDAKVYFFFKEKLTDNNRSTKQIHSMIARICPNDTGGLRSLVNKWTTFLKARLVCSVTDEDGPETHFDELEDVFLLETDNPRTTLVYGIFTTSSSVFKGSAVCVYHLSDIQTVFNGPFAHKEGPNHQLISYQGRIPYPRPGTCPGGAFTPNMRTTKEFPDDVVTFIRNHPLMYNSIYPIHKRPLIVRIGTDYKYTKIAVDRVNAADGRYHVLFLGTDRGTVQKVVVLPTNNSVSGELILEELEVFKNHAPITTMKISSKKQQLYVSSNEGVSQVSLHRCHIYGTACADCCLARDPYCAWDGHSCSRFYPTGKRRSRRQDVRHGNPLTQCRGFNLKAYRNAAEIVQYGVKNNTTFLECAPKSPQASIKWLLQKDKDRRKEVKLNERIIATSQGLLIRSVQGSDQGLYHCIATENSFKQTIAKINFKVLDSEMVAVVTDKWSPWTWASSVRALPFHPKDIMGAFSHSEMQMINQYCKDTRQQHQQGDESQKMRGDYGKLKALINSRKSRNRRNQLPES

SEQ ID NO: 121 - DNA, 8148 bp, Homo sapiens
ccttcggccccggcggggctctggcgtacccaaaatgcaggccccagcggaacgcacagccctcctgtcctccgccggtgcccctttagccgccccacccccatccctaagggctctcattctccagctgcagccgcagctgggttccgaacacgccgccgggccccgggagggagaggggcaggtgccagggcggcgcgcagcctctgctcccggtgccagcttcagtgcgccgggcacacgcgcgccccgcaacccctccctcaccctttccccgttgctcaatctccgccagccgcggtcgctgcatcgtcagagagctgcaagagggaggcagcaaggtgcggccgccagcagtgacaccatgtgaccggcacggctcactgacacgcagctttggttaaagagcgggcgcacaggaggggaggagaccgcgcgcgggacggggaggaatggcctgtccgcgttaaaccatcacaagccatggttgcggaagggccacgcgtcccccagtaggagaatgactccgattcgtgaccctcagcgccggtgcatgtcgatatatttattgagtgtctactgtgtgccaggcactatatctatgtgcatagaaaaaccctggaaggccatacaacaatatatatagagtgatcgtctctgcttgctgagctaacaggggtgtcaagcttccattttggtatctacttctaaatacactcagaacaggagaaatttggactaattttcaaactacagacactttctaatcatgatgcatttcaaaagtggactcgaattaactgagttgcaaaacatgacagtgcccgaggatgataacattagcaatgactccaatgatttcaccgaagtagaaaatggtcagataaatagcaagtttatttctgatcgtgaaagtagaagaagtctcacaaacagccatttggaaaaaaagaagtgtgatgagtatattccaggtacaacctccttaggcatgtctgtttttaacctaagcaacgccattatgggcagtgggattttgggactcgcctttgccctggcaaacactggaatcctactttttctggtacttttgacttcagtgacattgctgtctatatattcaataaacctcctattgatctgttcaaaagaaacaggctgcatggtgtatgaaaagctgggggaacaagtctttggcaccacagggaagttcgtaatctttggagccacctctctacagaacactggagcaatgctgagctacctcttcatcgtaaaaaatgaactaccctctgccataaagtttctaatgggaaaggaagagacattttcagcctggtacgtggatggccgcgttctggtggtgatagttacctttggcataattctccctctgtgtctcttgaagaacttagggtatcttggctatactagtggattttccttgagctgtatggtttttttcctaattgtggttatttacaagaaatttcaaattccctgcattgttccagagctaaattcaacaataagtgctaattcaacaaatgctgacacgtgtacgccaaaatatgttaccttcaattcaaagaccgtgtatgctttacccaccattgcatttgcatttgtttgccacccgtcagtcctgccaatttacagtgagcttaaagaccgatcacagaaaaaaatgcagatggtttcaaacatctcctttttcgccatgtttgttatgtacttcttgactgccatttttggctacttgacattctatgacaacgtgcagtccgacctccttcacaaatatcagagtaaagatgacattctcatcctgacagtgcggctggctgtcattgttgctgtgatcctcacagtgccggtgttatttttcacggttcgttcatctttatttgaactggctaagaaaacaaagtttaatttatgtcgtcataccgtggttacctgcatactcttggttgttatcaacttgttggtgatcttcataccctccatgaaggatatttttggagtcgtaggagttacatctgctaacatgcttattttcattcttccttcatctctttatttaaaaatcacagaccaggatggagataaaggaactcaaagaatttgggctgcccttttcttgggcctgggggtgttgttctccttggtcagcattcccttggtcatctatgactgggcctgctcatcgagtagtgacgaaggccactgaaacccgccgagaaaaagaaacatccctgttgtctgctcagtcaagtccccacacatcagcaatctctcaccacttcttttgcaagtttacagaagcaaacagaaatgtacaggatacttaaaatggaataactttttggttgcaaaacagagacatggttctataatgcttcatgtccctccaagatttgagatcaatttagggattgtgaaatttttttttcaaatttcatacaatcatatttcccagtacttttcacaatcattttttacccatctaactctatgttttgtggcttcccggtctcttagaactttgaaaacatgatatacaataatgtttatttattatacatccagattctgaaataattttcctactgatgttcagctcacactatctgtacctttttagaagagaaaagaatcttgaattgtatatatttattttgctttacagaaaaaaatggtttcgtaaataatttgcctattttggttaacatagcacatggagataatcatctgaaagttatagggcactgccactgctgaatcagagcatgcccaatatttgaggtggctctgatttcctggcagctgaactcgggtagtccagtggcctagctggtaccacatctattcccatccagagacattctctggcaagtgttctcagctgaaaagtggttggggatgattcttaccttggtaattaaatgaagctacacatttgggtaatctagcaaatgaagtattttttccctcttggcaacttgtgtcagagttactctggtctgagtcaactttcgctggggaaaacctatggaacctactgcaaaaagattgtccaaaatgcctaagaaaatactcctctgatgcatttagccttcaaccctacctgtcttgctgaagggagaaaaatgttttagtacattataggcccagcagcttttattcatgtccaccagctagttgcacagagaatcatgtgtacctaactaaggatgatctaggataagtaactcctgttttatattgagtattttagggaagtctttaaaagacttgttttatatctataaatctaggttattacaaatacaagaattttgtaccttaaataagcctcatttctatttcttcttcattaattctccatctagtcttgtgaaaaaaaaaaaaaaaaaaccctcagagatagtctttgtgaagagcttctgacagaatcactgagtaccttccttcccccagatgaggaagacaagggggtctcagtgtctgtgctgtctcctcttctcttccccaaccaaggactgtgccattactgcccgtctcaactgtccatgcaggaggacagagttgcctggtactcttacccttgtccctctcctaaagggagcacaaggaaactgaagagactgaaaaagaagagagtttgtagctgaaaaagaatagggatagcaaggaaacccagaactgcattcccctaagtggggccatcccatgtgattgaattgtccatagcttgcctatggtgagaaatgtgcatgctccgtgagctggtctcttgaaacaggacttatgcttcctctatattctggttaaattttccaaacacataagttcactgagcacagatttcttatccagagacaagtagaatctaaccgcagactgttggcagagtttccaggcacttagccatgttcccttcctgactcaaatccccaaaggccttcactctcactgagaatcacactactgtcccatagataaggcaggcattgaagcacctgtcgtgatcctctaggggggagaatgaaaggttatttcctgcattgcatcatcatagcttttaatataatgctacagaatcatatccacattaggttagagttcagatatttggatatgaatacctaacctagccatatccatggccatctctgttcttttcagcaatgttttccatattatattagcaatgacagaaacagaacaagccaagatccagtcagttcttgggagcttgtctagagcaccaagtaatgaaatagccaggtagtgggatgactgtacctttaaaaatacataatttagtttgcaagctatattatgctactttctattttccttgttactttatagcaattcattttaccctcacaaagtcaatttagaaccttatcattaactgggatgtgtagtgatatttttgggcctctgggtttcatgtgtcaatacaaggaatatttatttaaaatagatttatttagaggaggcacagtgttgttgatctgtgtgacaccacccatatttttaaaaacctttgtatgtttctctaaatttgttgttgactgaatataatagaccctaccataattcgtcaaatatcactgattagttacatcctttgtgtgagattagctgtaaagtatactgctcttattcttattcagaatagttaattggtagccaaaaatacatgtatcacagatgttaggtcgaatttaaacagcacagtcaagtgctatggaagtttttctgctaaattagtagattaaagaatactataccctaggcatggggagcagcacgttttcctttggtaggtaggatctctatactagtgaacagtgccagttccacactttggacttagaactgttctctagttattgtaacacagaatactgtcaatccctaatttacttaatgttacttattggaagtggggctgatgaaatacgcacaggagggaaatctactgtgtttaggcacaggcagccccagtgtataaggagatcatattccaaaaggttgtcagttggttgtttgcaacctggaatgtattttcctttagagaccaggttatccatggtggttaggcccctagagcagctggaaaagatgatcaaaccaataggttagctgacatcgaataatgtaataggtttgctaaagaatctaaccatcaaatataatattgtttccagggagggtgtttgttcagagttgcctgttagtagaatctggactgtccatcccagccacatcccacctactggacagtaggggtagagatgccaccagactacaggtgaccagattggcctgaaacatggtgtccagtaaaaacggggaggaataagtccatgactgctggagagcttggtggtaggaggagggtgaaggagggtgagggggcctctcatgggtcagaaacctccagggacatccctcagctggtaactctgctgttgtccggagggttcaggcttggtgtgccttcttctgtttgtctgacttttggctcctatggttcatctcctgccctgcccaccacagaaaaggatgctgctgcatagcttctccaatgtaccagtcattgaggccagcgcgcagcacttttaatgtttttagtgctagtaactgtgttttaactctccaggaataagctgggaggttagaaaacaagaaaaaagggggaaaaaaaaacctctccacccactttccttttttacagttacagaccctgttgagaaaaagaagcacccagatgggtgatggtgatagggcttgtggtggacacagggttgtggtaagattcctcagtgcttcggcgagcacctaagactattaccctggaactgactgctttctagagcttgattcatgcctctaagccagtggttctcaaagtgtggcccctagaccagtagcatcagcatcatcggggacctcattagaatgcagattctcagccccctcccagacatggtgaagtcagaagctctcagggagggactcagcaaatgattctaaagcgcatcaagtttgagaaccaccctaagccaatgagtctcccttttacttcccattagtcctccctcaccagatgattcctaggactcatggtgcaacatacaggagccaggctttagggaggggaggaaaggagcctggcggcaggggtctctgcaatggcaagaaagtgagtgaatccagcgctgccacctggttatccccttctcgttgaaaatagcagcgcaggtgcaaattcctaaacacaggctgcctgcactcggtgttacctcgggctgaggcatgataatattttattttttaaagctgtgaggaaatgaaagtgaggctttggttggggcgaggcagttgtgaaagaaattaaaataaaagaccctttgtaaatgcagacttagaagaaatactgaatttgtgtcagaagttctccagtgtttgtgttaatcgtgtggtgataatcctgtcctccttttaaagcgaattctctactgaaaggtctgctctgcttaaggagctacaaactgctctcaaaagaatgaaatactgagttccaattcagtgaggcacagtgttggactatggcacatttagttggagtcggggggaggtcaggaatatgatcagataatggattttataccttagagcaaaatctattagtctctctcagtttatcaatttaaatggctttaggcttatagggggtgtaaactttaagaatataattctcccattcaagtttacagcaaacatctagccaccttcaaaacaaagaatatacagaccatcatttagcaatactaatacatgattttccttggggatggcaggtttgagaatcctttagcaacaggacatacttcccctaaattacagtgaattatttataacgagataaagctttcaggtacaagctgaaggtggggtgtctaacaactaaaaactatcactaaatctcaaagagaaagttcttgcaaaatatgtaaagttcacaaggtgcagacattttccttctttaggcttttatctaaggaagggctatgaaactgggcccatctgtatacaggctcaaatttacgtttttaaaggaagaatctatgcagctgaggcttattgcaggaaatacttcatttgtatgtaaatattattgtaaataaataggaggctgtatatttttgaagttgttgatctgcactgaaatagaagtctctaggatctgcatataaacaataaatgtttcctagaaattagtggttttgtttgggaattagaaaaatttacattctctcccaggtaacatagttctctcaatgtaaacttggaacctgaaaccctacttaatttagagaaagaaatgtctgagaaatagttcccttgatttcttatgctggcattaagatcaattatttaacagatagtcctctgagatacaagtaaggaatatttagacacaaatccttgtcctatagaaacagatatacccaaatgacaaattgtttcttcataatgatcttccatttttaacactgataccactacacagtacatatgaaaacagaagctggggagaagaatgtttttttcacaattgaattgctgcatttctcaaactttgggatctatgaaagcggggagagggaacctgaatattaattatgagcacaaatttgaaggaaagaaaacaaagaaccattatctaatcaagctttgaaagtcctgcatgtttgccttttattttagtgttgacgccaacatagactgtctaaggtatttttttccccaaacacttgaatcttggtcgttggtatgtaatccactctctagagtccagtgtactttagacttcatctgagtccaatacatgtaccacactactgttttattaatgtaaaaaccttgtaaatgaatttcagatgggtgatttaagtgagtcacaagtcacaaaactttgctattcatagttaatcaaatagaactgggttttttttttcagagtgtggtgtaaataaagaaatataagaagttctgttctataactgctctgttaacatagtttttaaacattaaaaaatgtgaactaaaagtatttaaaaa

SEQ ID NO: 122 - protein, 487 aa, Homo sapiens
MMHFKSGLELTELQNMTVPEDDNISNDSNDFTEVENGQINSKFISDRESRRSLTNSHLEKKKCDEYIPGTTSLGMSVFNLSNAIMGSGILGLAFALANTGILLFLVLLTSVTLLSIYSINLLLICSKETGCMVYEKLGEQVFGTTGKFVIFGATSLQNTGAMLSYLFIVKNELPSAIKFLMGKEETFSAWYVDGRVLVVIVTFGIILPLCLLKNLGYLGYTSGFSLSCMVFFLIVVIYKKFQIPCIVPELNSTISANSTNADTCTPKYVTFNSKTVYALPTIAFAFVCHPSVLPIYSELKDRSQKKMQMVSNISFFAMFVMYFLTAIFGYLTFYDNVQSDLLHKYQSKDDILILTVRLAVIVAVILTVPVLFFTVRSSLFELAKKTKFNLCRHTVVTCILLVVINLLVIFIPSMKDIFGVVGVTSANMLIFILPSSLYLKITDQDGDKGTQRIWAALFLGLGVLFSLVSIPLVIYDWACSSSSDEGH

SEQ ID NO: 123 - DNA, 3995 bp, Homo sapiens
ccccgccccgctcctctccggccgcgcagccgctgccgcccacccgcacccgccgtcatgctccgggccgcgctgcccgcgctcctgctgccgttgctgggcctcgccgctgctgccgtcgcggactgtccttcatctacttggattcagttccaagacagttgttacatttttctccaagaagccatcaaagtagaaagcatagaggatgtcagaaatcagtgtactgaccatggagcggacatgataagcatacataatgaagaagaaaatgcttttatactggatactttgaaaaagcaatggaaaggcccagatgatatcctactaggcatgttttatgacacagatgatgcgagtttcaagtggtttgataattcaaatatgacatttgataagtggacagaccaagatgatgatgaggatttagttgacacctgtgcttttctgcacatcaagacaggtgaatggaaaaaaggaaattgtgaagtttcttctgtggaaggaacactatgcaaaacagctatcccatacaaaaggaaatatttatcagataaccacattttaatatcagcattggtgattgctagcacggtaattttgacagttttgggagcaatcatttggttcctgtacaaaaaacattctgattctcgtttcaccacagttttttcaaccgcaccccaatcaccttataatgaagactgtgttttggtagttggagaagaaaatgaatatcctgttcaatttgactaagtttttggtaatcttgcactaagacatcaacaaaatgccctggcagagataacttgggaaagattttaatataaaacttgacattggatattagagctttaatggtattccttattccagtaacatttttatgtactcatctgctgtgaaaagtctttaggttcattaaaaaaacaggttttagaaatgatcttagatctaatatagtgattttaagcatcccgtcaaaggcagaatctgtcacttgaatgaaggaaagcttaaagcccaagcagataaaaataaaagcccagcctatttgtcttgcctgctgtatcttccctatttagttgacccactttagtttatatgtttattagtaaacatgaaatggggaataagtgattttaagtacatcccatacatttaaatatctttgataattgttatttttttggcagataattcctctagaatgtgtatctttttatgatttagatgaagaaaattttacaacttttaacaccccacaccaattttagtttcattacttttacacacaccattttatcacaaatgactcaagttttaatgaatgtttataaattatttgaaacaaaatatgatcgctgtgtccaggatggcatagagaaagctggcaattaggttaacacttacatattatagtgcccctttaaggatttctctcttgccaccataccttttgtactttcccctatacaagatgtatctcattctcctcaagcatttataaatttttccttcaatgacatgaaaactgtgcaagcaaaaaccgaagaaaaacacttaagtacaactgtagtgacagtgatcaaagttttcagtgcatttattgtacattttaagaaaaaggtgaaaatcatttggggagtaaaaaaatgaaaaagctgaaacgagtaattttcctcaccatcaataaaccaaaaacaggaaagataaagaatgtataaatttcacgtaaattagtcacgtatcacttatcaatggggatacgttctaagaaatgcatagttagggaatcttgtgtgaaaatcagcttgtatttacacaaacccagatggtagagcctattttgtcccaaacctacacagcatgttactgtgctgaatactgcagacaattgtaacacaatatttgtgtatctaaatatagaaaaggtacagtaaaaatatggtctactaaggaaacactgttctatatgtggtccattactgactgaagtatactgtctagaagtctgaggctcaaagaaaagtaatccctcttctgaatccacaccccatcaattatcttactttcttctggggagatagatagatatactatctcactagcttgactaatggcaacaaagttccagcttgtgtagtctctttttattgaccacatgaatcgaaaacactcatcacaattaatggcactatcattaatgagacatgagtaactaaaaagtgatagaaaactattaacagtgcggctacatggtactgaaaatgcaggcattacaccagctgttacacaagcacaagcatgctctgtaagagctttacatttctgagattttgtatagtgattgagatgtctattttattattgatagactattactaatgtcaatattgaacactaccctggaattcctgcctggttttcctacccaaattgtaccactccttgaagaactacaggcacagtaaaaaaaatatggcgtattatgtgaactaaaagagttctaaaggagttcttaaaggagtggtagaatttgggtaggaaagtgattaagtccaacttaaaaccaacagtctcaaacgtctacaactacaatgtccaatgagccactagccacatgaggctatttaagtaaatttagtttaaaatccagttttcgaattacattagccacattgtcaagtgttcaaatcacaggtggttagtggctactgtactgggcaacatacattatagaacattttcattataggaagttttattgggcagtgctgctcttaaatcctaccttccactcaactcccatacaactttcttttgtacattttgatactttctacctaatggcagctcttccaaaatagctgctttaaactctgatttaattttcaatatttggtttcatttttcaacaggccaagaggcctctggtaatgaagtgctatatatatatatatgatggagtctcactgtgctgcccaggctacagtgcagtggctcgatcttggctctctccaatctccgccttgcaggttttcaagcaattctcctgcctcagcctccttagtagctgggaccacagacatctgtcaccacacccagctaactttttgtatttttggtagagacggggtttcgccatattgactgggctggtctcaaactcctgacctcaagtgatccacccaccttggtctcccaaagtgctgggattacatgcgtgagccaccacacttggcctacattttttctttatataccagaacatctataacaggcaccttatctactcattagtgaagagataattggattacacaggcaggcttgtttactacatccagaatgtagaaactgctttcttcaacatcttggttctagctagtaataacaatataattctttggcagatattcagaataacattttaaactacattttcttagaaaattgcattcttgtagtgagcagtgtatggtctcttttgttcagaatttaaaactgataaccaatgaaagccttttctcttattcctctaccgtcatttacatgataatctgaagctaatatgacaatatttaaatactaagtggtactagggaactacaagaatactgtaaagcttaagccattgttatcactgtcatttagcatttaataacaaaactatacagaattatgtgcataccaatgaatgttttgtaccatctagttaaattttttaaataaagttttatgggttaagcagaagacaactgtcatactgaattttattaaaagtatatatacttcaaattcaaagcatcccttaggacccacagaatatattaaaactaccacccttaaattttatatttttgctttaagacagacaatgcaaaggtaactggcaagaggtgagcaaatgttttagaacatttatattattgcttaaaatgagatttgaaattgtaataaaattcttggttatgaaaaaaaaaaaaaaaaaa

SEQ ID NO: 124 - protein, 232 aa, Homo sapiens
MLRAALPALLLPLLGLAAAAVADCPSSTWIQFQDSCYIFLQEAIKVESIEDVRNQCTDHGADMISIHNEEENAFILDTLKKQWKGPDDILLGMFYDTDDASFKWFDNSNMTFDKWTDQDDDEDLVDTCAFLHIKTGEWKKGNCEVSSVEGTLCKTAIPYKRKYLSDNHILISALVIASTVILTVLGAIIWFLYKKHSDSRFTTVFSTAPQSPYNEDCVLVVGEENEYPVQFD

SEQ ID NO: 125 - DNA, 1951 bp, Homo sapiens
gagcccggagcaggccgggctcaagaaagaggaaagttgaggacgccccacctcggagaggcggcgcccctgagtaggccaggagcctctcttgcaacttctgccaccgcgggccaccgcggccgcctgatcccgcagaggaaggtcgcggccgtggagcgatgacccgcggcggtccgggcgggcgcccggggctgccacagccgccgccgcttctgctgctgctgctgctgctgccgctgttgttagtcaccgcggagccgccgaaacctgcaggagtctactatgcaactgcatactggatgcctgctgaaaagacagtacaagtcaaaaatgtaatggacaagaatggggacgcctatggcttttacaataactctgtgaaaaccacaggctggggcatcctggagatcagagctggctatggctctcaaaccctgagcaatgagatcatcatgtttgtggctggctttttggagggttacctcactgccccacacatgaatgaccactacacaaacctctacccacagctgatcacgaaaccttccatcatggataaagtgcaggattttatggagaagcaagataagtggacccggaaaaatatcaaagaatacaagactgattcattttggagacatacaggctatgtgatggcacaaatagatggcctctatgtaggagcaaagaagagggctatattagaagggacaaagccaatgaccctgttccagattcagttcctgaatagtgttggagatctattggatctgattccctcactctctcccacaaaaaacggcagcctaaaggtttttaagagatgggacatgggacattgctccgctcttatcaaggttcttcctggatttgagaacatcctttttgctcactcaagctggtacacgtatgcagccatgctcaggatatataaacactgggacttcaacgtcatagataaagataccagcagtagtcgcctctctttcagcagttacccagggtttttggagtctctggatgatttttacattcttagcagtggattgatattgctgcagaccacaaacagtgtgtttaataaaaccctgctaaagcaggtaatacccgagactctcctgtcctggcaaagagtccgtgtggccaatatgatggcagatagtggcaagaggtgggcagacatcttttcaaaatacaactctggcacctataacaatcaatacatggttctggacctgaagaaagtaaagctgaaccacagtcttgacaaaggcactctgtacattgtggagcaaattcctacatatgtagaatattctgaacaaactgatgttctacggaaaggatattggccctcctacaatgttcctttccatgaaaaaatctacaactggagtggctatccactgttagttcagaagctgggcttggactactcttatgatttagctccacgagccaaaattttccggcgtgaccaagggaaagtgactgatacggcatccatgaaatatatcatgcgatacaacaattataagaaggatccttacagtagaggtgacccctgtaataccatctgctgccgtgaggacctgaactcacctaacccaagtcctggaggttgttatgacacaaaggtggcagatatctacctagcatctcagtacacatcctatgccataagtggtcccacagtacaaggtggcctccctgtttttcgctgggaccgtttcaacaaaactctacatcagggcatgccagaggtctacaactttgattttattaccatgaaaccaattttgaaacttgatataaaatgaaggagggagatgacggactagaagactgtaaataagataccaaaggcactattttagctatgtttttcccatcagaattatgcaataaaatatattaatttgtcactttaaaaaaaaaaaaaaaaaaa

SEQ ID NO: 126 - protein, 553 aa, Homo sapiens
MTRGGPGGRPGLPQPPPLLLLLLLLPLLLVTAEPPKPAGVYYATAYWMPAEKTVQVKNVMDKNGDAYGFYNNSVKTTGWGILEIRAGYGSQTLSNEIIMFVAGFLEGYLTAPHMNDHYTNLYPQLITKPSIMDKVQDFMEKQDKWTRKNIKEYKTDSFWRHTGYVMAQIDGLYVGAKKRAILEGTKPMTLFQIQFLNSVGDLLDLIPSLSPTKNGSLKVFKRWDMGHCSALIKVLPGFENILFAHSSWYTYAAMLRIYKHWDFNVIDKDTSSSRLSFSSYPGFLESLDDFYILSSGLILLQTTNSVFNKTLLKQVIPETLLSWQRVRVANMMADSGKRWADIFSKYNSGTYNNQYMVLDLKKVKLNHSLDKGTLYIVEQIPTYVEYSEQTDVLRKGYWPSYNVPFHEKIYNWSGYPLLVQKLGLDYSYDLAPRAKIFRRDQGKVTDTASMKYIMRYNNYKKDPYSRGDPCNTICCREDLNSPNPSPGGCYDTKVADIYLASQYTSYAISGPTVQGGLPVFRWDRFNKTLHQGMPEVYNFDFITMKPILKLDIK

SEQ ID NO: 127 - DNA, 3121 bp, Homo sapiens
taggactgatctccaggaccagcactcttctcccagcccttagggtcctgctcggccaaggccttccctgccatgcgacctgtcagtgtctggcagtggagcccctgggggctgctgctgtgcctgctgtgcagttcgtgcttggggtctccgtccccttccacgggccctgagaagaaggccgggagccaggggcttcggttccggctggctggcttccccaggaagccctacgagggccgcgtggagatacagcgagctggtgaatggggcaccatctgcgatgatgacttcacgctgcaggctgcccacatcctctgccgggagctgggcttcacagaggccacaggctggacccacagtgccaaatatggccctggaacaggccgcatctggctggacaacttgagctgcagtgggaccgagcagagtgtgactgaatgtgcctcccggggctgggggaacagtgactgtacgcacgatgaggatgctggggtcatctgcaaagaccagcgcctccctggcttctcggactccaatgtcattgaggtagagcatcacctgcaagtggaggaggtgcgaattcgacccgccgttgggtggggcagacgacccctgcccgtgacggaggggctggtggaagtcaggcttcctgacggctggtcgcaagtgtgcgacaaaggctggagcgcccacaacagccacgtggtctgcgggatgctgggcttccccagcgaaaagagggtcaacgcggccttctacaggctgctagcccaacggcagcaacactcctttggtctgcatggggtggcgtgcgtgggcacggaggcccacctctccctctgttccctggagttctatcgtgccaatgacaccgccaggtgccctggggggggccctgcagtggtgagctgtgtgccaggccctgtctacgcggcatccagtggccagaagaagcaacaacagtcgaagcctcagggggaggcccgtgtccgtctaaagggcggcgcccaccctggagagggccgggtagaagtcctgaaggccagcacatggggcacagtctgtgaccgcaagtgggacctgcatgcagccagcgtggtgtgtcgggagctgggcttcgggagtgctcgagaagctctgagtggcgctcgcatggggcagggcatgggtgctatccacctgagtgaagttcgctgctctggacaggagctctccctctggaagtgcccccacaagaacatcacagctgaggattgttcacatagccaggatgccggggtccggtgcaacctaccttacactggggcagagaccaggatccgactcagtgggggccgcagccaacatgaggggcgagtcgaggtgcaaatagggggacctgggccccttcgctggggcctcatctgtggggatgactgggggaccctggaggccatggtggcctgtaggcaactgggtctgggctacgccaaccacggcctgcaggagacctggtactgggactctgggaatataacagaggtggtgatgagtggagtgcgctgcacagggactgagctgtccctggatcagtgtgcccatcatggcacccacatcacctgcaagaggacagggacccgcttcactgctggagtcatctgttctgagactgcatcagatctgttgctgcactcagcactggtgcaggagaccgcctacatcgaagaccggcccctgcatatgttgtactgtgctgcggaagagaactgcctggccagctcagcccgctcagccaactggccctatggtcaccggcgtctgctccgattctcctcccagatccacaacctgggacgagctgacttcaggcccaaggctgggcgccactcctgggtgtggcacgagtgccatgggcattaccacagcatggacatcttcactcactatgatatcctcaccccaaatggcaccaaggtggctgagggccacaaagctagtttctgtctcgaagacactgagtgtcaggaggatgtctccaagcggtatgagtgtgccaactttggagagcaaggcatcactgtgggttgctgggatctctaccggcatgacattgactgtcagtggattgacatcacggatgtgaagccaggaaactacattctccaggttgtcatcaacccaaactttgaagtagcagagagtgactttaccaacaatgcaatgaaatgtaactgcaaatatgatggacatagaatctgggtgcacaactgccacattggtgatgccttcagtgaagaggccaacaggaggtttgaacgctaccctggccagaccagcaaccagattatctaagtgccactgccctctgcaaaccaccactggcccctaatggcaggggtctgaggctgccattacctcaggagcttaccaagaaacccatgtcagcaaccgcactcatcagaccatgcactatggatgtggaactgtcaagcagaagttttcaccctccttcagaggccagctgtcagtatctgtagccaagcatgggaatctttgctcccaggcccagcaccgagcagaacagaccagagcccaccacaccacaaagagcagcacctgactaactgcccacaaaagatggcagcagctcattttctttaataggaggtcaggatggtcagctccagtatctcccctaagtttagggggatacagctttacctctagccttttggtgggggaaaagatccagccctcccacctcattttttactataatatgttgctaggtataattttattttatataaaaagtgtttctgtgattcttcagagcccaggagtcagtgctggtggttggagggacctgcccccactggttcatttaaccctctgtctcggtgccctcagaacctcagccagaaaggcaaggaggaaatcagagcaggagcctcatactcttggtgatctattcattctgtgacctcaggggtcacatataaggtcagtgtttctcgtccccgccggatctgcactgccaactgggattgggttcgaacagcttcataaacatcttcagcattttgtaccatctgctccccaatggccaaaatcacatcaccaggccgcagaccagccc

SEQ ID NO: 128 - protein, 753 aa, Homo sapiens
MRPVSVWQWSPWGLLLCLLCSSCLGSPSPSTGPEKKAGSQGLRFRLAGFPRKPYEGRVEIQRAGEWGTICDDDFTLQAAHILCRELGFTEATGWTHSAKYGPGTGRIWLDNLSCSGTEQSVTECASRGWGNSDCTHDEDAGVICKDQRLPGFSDSNVIEVEHHLQVEEVRIRPAVGWGRRPLPVTEGLVEVRLPDGWSQVCDKGWSAHNSHVVCGMLGFPSEKRVNAAFYRLLAQRQQHSFGLHGVACVGTEAHLSLCSLEFYRANDTARCPGGGPAVVSCVPGPVYAASSGQKKQQQSKPQGEARVRLKGGAHPGEGRVEVLKASTWGTVCDRKWDLHAASVVCRELGFGSAREALSGARMGQGMGAIHLSEVRCSGQELSLWKCPHKNITAEDCSHSQDAGVRCNLPYTGAETRIRLSGGRSQHEGRVEVQIGGPGPLRWGLICGDDWGTLEAMVACRQLGLGYANHGLQETWYWDSGNITEVVMSGVRCTGTELSLDQCAHHGTHITCKRTGTRFTAGVICSETASDLLLHSALVQETAYIEDRPLHMLYCAAEENCLASSARSANWPYGHRRLLRFSSQIHNLGRADFRPKAGRHSWVWHECHGHYHSMDIFTHYDILTPNGTKVAEGHKASFCLEDTECQEDVSKRYECANFGEQGITVGCWDLYRHDIDCQWIDITDVKPGNYILQVVINPNFEVAESDFTNNAMKCNCKYDGHRIWVHNCHIGDAFSEEANRRFERYPGQTSNQII

SEQ ID NO: 129 - DNA, 5720 bp, Homo sapiens
gcggctcaggggcggggacgggggcgtggtcccgccgtataagaacggagggggcggcggcgggacggctcactcggtgccgctgcctaggggctgtagaggtcgcgccgctcctgctggggcctgcccacgccaaggacctgcctctgtcgcctcctcttctattgcccagtttccccagccagaacatcccctgaagatggcagaggagagcagctgtaccagggattgcatgtccttcagcgtgctcaactgggatcaggttagccggctgcatgaggtcctcactgaagttgtacctatccacggacgaggcaactttccaaccttggagataactctgaaggacatcgtccagaccgtccgcagtcggctggaggaggcaggcatcaaagtgcacgacgtccggctgaatggctccgcagctggccacgttttggtcaaagacaatggcttgggctgcaaagacctggacctaatcttccatgtggctcttccaacagaggcagaatttcagctggttagagatgtggttctgtgttcccttctgaacttcctgccagagggtgtgaacaagctcaaaatcagtccagtcactctgaaggaggcatatgtgcagaagctagtgaaggtttgcacggacactgaccgctggagcctgatctccctctccaacaagaacgggaagaacgtggagctgaagtttgtcgactccattcggcgtcagtttgagttcagtgtggactctttccaaatcatcctggattctttgcttttcttctatgactgttccaataatcccatctctgagcacttccaccccaccgtgattggggagagcatgtacggggactttgaggaagcttttgaccatctgcagaacagactgatcgccaccaagaacccagaagaaatcagaggcgggggacttctcaagtacagcaaccttcttgtgcgggacttcaggcccacagaccaggaagaaatcaaaactctagagcgctacatgtgctccaggttcttcatcgacttcccggacatccttgaacagcagaggaagttggagacttaccttcaaaaccacttcgctgaagaagagagaagcaagtacgactacctcatgatccttcgcagggtggtgaacgagagcaccgtgtgtctcatggggcatgaacgcaggcagactctgaacctcatctccctcctggccttgcgtgtgctggcggaacaaaacatcatccccagtgccaccaacgtcacctgttactaccagccggccccttacgtcagtgatggcaacttcagcaactactacgttgcccatcctccagtcacctacagccagccttaccctacctggctgccctgtaactaaccttgagacctgagggtttccacagtgggaaccccaatagggctagggctctcaggtaggggagcctccttctagatgtaggcatttggcttttaaaggggaactcagctctgattctgcttttttttttttttttcctttgtgtacccattggaatgggtctacagtgtatcatgagccaaccctcaaaggacccgtattacagtgccacgttggaaaacgctacaggaagcatgacctatccacatctttccaagatagacactaacatgtcatgtcccaaacattagcacgtgggggttgagctctgtgcagtaatcgagattgggagaatttgggcagcgcgtgagaagtgctaagctacttgttttctcacttgagcccgggtaggctgtgttggccctcacttgggattctcagcagttacatgaaagttgtgctgataatctcttctcttgtaccaattttagtcaggcagaaaatggtaaacatgagggtgctcttgtgacttaatttttgttcaagggactaaattgcttatgtttattccctgtcagcggagtggagaatgtcattcatcaataaaccaaagccaatagctggagaattgagatctggttgaaagtggtttatggtttacatgctgtactatcctgaggaattgcgagatattgctgaggggaaaaaaaaatgaccttttcttgaaatgtaacttgaaaacaaaataaaatgtggaacataatgtttaattagaattgtggtggtggtagtggaaggggataattgtaaataggaaacatgaatgttcatttttttctttaaagaattcttattaaatggctccctgccttttttttcttttttcctcatcagctctttcatggctgaattttgttttattcttcctaagactgaggattgtgctgagtccagagtcattgtggtaactgacatgagggtcttcccatgttttaactggaaacccactttggtcacattccaagtatgacacagctgttcttctggagtactttagctattttttgtttttgttcttttcgttttttttttttccaaaaatagtgacttccttctccaggtgtgtttgacagcaactcaattcaggaatttcggtagaactgagtgacctgtggaactgctttagaatctaacctgctgtcttcgtgctctgtgtgaaggggaagctggggggttagcatgaagtctggccttgtgtgcattggagcttccaaggcactttgaaatcattccagtatatttgggaagaattgagtgaatgagaatgctcttccttattctggtagatttgacttgtttataattctgcactttagaagaaaaacagtgttaatctgtagttgaaagaaagcttagtagatgagagagttctaggctactgtggctttttccagtagatttagatgagattatgtgttttgaaatgttttgtgggatcccttagaaagcatcacttcagggcagagacactcaatattgccagccagcttgggttctaaagtgatttaatcaaattcatgctcctgatcttttttttcccccttcctttggctatgaaaacccaaagcccggagtgattgttttctccttgctttaagcagtgaagttatcctaatgcaaaagagcttagtagaaaatgagtggtttacctttttttctaaaagtatattttcaagtttattctggaatgtgatgtcttggtcctcttaaaagcagatcagccatgactgaaactcaaggcttagctggtatctatgttgtgctacattaggtgactagaagccacttcttagtgtaatcagctcctgtttccctgtgagccttagttatattttaattcagtggctttgagtcaaggccggttctaattgaggggacccagtgtgcttcagtgttaagagtggggcaatgaagagtgaaccccaatgaagagtgatcccaactttggaaactatctggtcattcatgaccttaaaaagctgccatggtggtcaaatggcatgtgtttgcacaaaaatgaccgatgtgtttaaccaaagctttgaaatgtgatgaagccaccaacataagcacttgcctaacagaaatcagtatttcttctacttagaaggcttggggcccagggtaatgaggcaccagatgaagataagatctgcatcaaggaattaaatttccagtttgtccttggggttctttctgcttatgttttttcccccccatctggtaatagtcctcttctgagaatgaaaggaggcacagaagttgcgagaaagacccagtccccagtctttgccaccattgcaccatggttgtctcggagtcccttcacctgacctttttagtcagctcagatctttttgtagtttgagaatagacctattcaagagctatcagggttaaaagctgcactgaccaaagctgtacttttaaaacacaacccctgggctagtgatgtctctacttgctctatgagccttttgccagcctcagaataggcgaggtaaccttgaatttcagggccctggaaactctagctgaaacctgcctttcctaatgctcacacaagcaccaggtaccctgagcttatactgagtccagtggttcctattttatgtgtgtgtgtatgtgtgtgtgttgagtaacatgaaacttggcagtagcagagagcactgaagttcacatgcaagttctaatctaaagttaagcagtctcttatttgtttcgggactctgatttgactctttttctgatgctttcggcatgtctgcagcctgttctcctagcctgctgcttggagtcaggttgagcatcagtgagatgaagacagtaccttttcctctcacattggcagaatagcacgcactagatgcctgaccttgagctctagtctcccctttaaatcttaccttggcagtaacacattattcctcattcaataatttcaatgctgaaactgaactctattactaatgccttccaatcagagttcctgatggggatgcctgtgggatggcccacacctgggggacctggcagatggggtgagttgggtaaggaagatgatgcttagttcctgatagatgctacagatgtagtttggcatttcagtttttgtccagtttgattttcactggggtttgagtcacagcaagctgtgtatgaacttgtgttttgtggtgacacattaataatcaaattgctaaaaccctgaatctgcttattcttcagcttcacctctgcactaaccccttacccttatggtacgtcaggattttaactagtactgctttgttgactttgggaaatggtgccactcaaaagcaacttcctaacttgaggaataactcctttgtagtttactttctggtactggttggtgccttgtattgggatacagctatattcttagctcaaatgtcctctttttgagagcaaagtagttatccaatggtgagacgagaccctgacgctcatagaggccattccttcctgggtgtcggaccagggctctgtgtcagggaaaaccttctgggtggactttgtaagaatccagtttccaaggttagattcacatccttaatcttgcagagactagaatttcacagctcgctttggaacatattccaattcaaccagttaaaatcagaggaccaagtcgtgggggaggggggcggtgttgaggagaggtatttttaaagatctggcaacttttcaggattatttgtggagaactctaaggttaagatcaggaaataaaagactgtgtgtgtgtgtgtgtgtgcgtgtgtgtgttcaagtgcctaaatcttgtttacctatcactttaaaaaaataattgaagtgtaagctaaataaaatgcttggagttttgcctgggctagtgagagttggtgcaaattcttgtgtgtgtttgcataggaaggtgagatgaccatctactaaagaggaagtagctaaatacagatctgtgggtgtttttaaaaaaactcaacctatctggtgttttattttaatggataaaaatgtaatttttctaaggtagcaacttatttccaaattaatatagatgaaaaatagataccaattagactaaattgaaagctttttgttctatatttgcatagcctttgaaatatttcttagtgcctaggaggtctggggattcctctttcgtggtggtcactaaccttacttgatgcagataaaatcacttgtcaatgcaaaatgtgttagaacttgataaagctttgagtttgagaaataaaggtatatttaaaatttaaataaaacttgtcatttatgctca

SEQ ID NO: 130 - protein, 391 aa, Homo sapiens
MAEESSCTRDCMSFSVLNWDQVSRLHEVLTEVVPIHGRGNFPTLEITLKDIVQTVRSRLEEAGIKVHDVRLNGSAAGHVLVKDNGLGCKDLDLIFHVALPTEAEFQLVRDVVLCSLLNFLPEGVNKLKISPVTLKEAYVQKLVKVCTDTDRWSLISLSNKNGKNVELKFVDSIRRQFEFSVDSFQIILDSLLFFYDCSNNPISEHFHPTVIGESMYGDFEEAFDHLQNRLIATKNPEEIRGGGLLKYSNLLVRDFRPTDQEEIKTLERYMCSRFFIDFPDILEQQRKLETYLQNHFAEEERSKYDYLMILRRVVNESTVCLMGHERRQTLNLISLLALRVLAEQNIIPSATNVTCYYQPAPYVSDGNFSNYYVAHPPVTYSQPYPTWLPCN

SEQ ID NO: 131 - DNA, 1830 bp, Homo sapiens
agccactctgagcagaactgacagcatgaaggcactcctggccctgccgctgctgctgcttctctccacgcccccgtgtgccccccaggtctccgggatccgaggagatgctctggagaggttttgccttcagcaacccctggactgtgacgacatctatgcccagggctaccagtcagacggcgtgtacctcatctacccctcgggccccagtgtgcctgtgcccgtcttctgtgacatgaccaccgagggcgggaagtggacggttttccagaagagattcaatggctcagtaagtttcttccgcggctggaatgactacaagctgggcttcggccgtgctgatggagagtactggctggggctgcagaacatgcacctcctgacactgaagcagaagtatgagctgcgagtggacttggaggactttgagaacaacacggcctatgccaagtacgctgacttctccatctccccgaacgcggtcagcgcagaggaggatggctacaccctctttgtggcaggctttgaggatggcggggcaggtgactccctgtcctaccacagtggccagaagttctctaccttcgaccgggaccaggacctctttgtgcagaactgcgcagctctctcctcaggagccttctggttccgcagctgccactttgccaacctcaatggcttctacctaggtggctcccacctctcttatgccaatggcatcaactgggcccagtggaagggcttctactactccctcaaacgcactgagatgaaaatccgccgggcctgaagggctggccccctcaggcacctttcctcccctggacacccatggtctccatgagtgctccctctgctgcccctgatgcatgcttctgctgattcccgagcaccaactccttacaagggggccttgtggctctcagccatgccacatccctgtcacacacccagggcatccattcctaagccagacccggctcccctacacctgaagttacactgccagcagttccccaggcctcttccgagaggcacatggttctagcctggacctggctgggctccatgagaatgagttgcctccaccctgtcccaacagctgacagccaggagccactctcccagctgcaggcctttgtggtccatcttgtcctgcttcctcactgtggacccctgtctgggccaccctagtgtgctaagctgagcagtgcagtgtgaacagggcccatggtgtattctaggccacagcccagcactcctctgggctgctctcaaaccatgtcccatcttcagcatccctcccaccaacttactcccctgtggtgagtaccgtggaaccccagcccacctcactatcatactcagcttcccctgatggcccatcccagcccctgaagctctatgccaagaacacagctaccgcacaccaccctgaaacagccacagccaaggtaggcatgcatatgaggtcttccccataccctctgggtgttgagaggtttagccacatgagggagcagaggacaatctctgcagggctgggagtgggtagggactgaaggtctcaataaaccttcagaacctgaatgaactggcttcatacacacaaacatatttgtttatcccccaaatgtaggcacctggctcctccttgctcccctgctgatggtgtcctaccccgaactccaaaaattacacctggagtcaggtgcagaagggaaccttgtatttcacaggcctcattttgatggcaaaaagacagtgtaataataacataataataataaaaatataatactgaaaaggaaaaaaaaaaaaaaaaaa

SEQ ID NO: 132 - protein, 255 aa, Homo sapiens
MKALLALPLLLLLSTPPCAPQVSGIRGDALERFCLQQPLDCDDIYAQGYQSDGVYLIYPSGPSVPVPVFCDMTTEGGKWTVFQKRFNGSVSFFRGWNDYKLGFGRADGEYWLGLQNMHLLTLKQKYELRVDLEDFENNTAYAKYADFSISPNAVSAEEDGYTLFVAGFEDGGAGDSLSYHSGQKFSTFDRDQDLFVQNCAALSSGAFWFRSCHFANLNGFYLGGSHLSYANGINWAQWKGFYYSLKRTEMKIRRA

SEQ ID NO: 133 - DNA, 2594 bp, Homo sapiens
cgcctccaggccccttcccgcgtcgcgacgcacgctgccccggaaggccgcggcgctgtagtgcggcgtgggagccccaggttctttagtggaagaacgcgaagcgaggatgagtgatccgtggaggcagtaacaggcgcggcgagggagaagtgattcccgaagaatcaaggctgggccggacccggtggcctggcaacagggtaataagagaaatgaagccaacaggtacagacccaaggatcttatctatagctgctgaagttgcaaaaagccctgagcagaatgtccctgttatactgttgaagttaaaagaaataataaacatcacacctttaggaagctcagagttgaagaaaatcaaacaagatatatattgttatgatctcattcaatattgcctcttggtcctcagtcaagattattctcgaatccagggtggttggactacaatttcccagcttacacagatattaagccattgctgtgtgggcttggagccaggagaagatgcagaggaattttacaatgaattacttccatcagctgcagaaaattttctagttttggggagacaattacaaacatgttttatcaatgcagctaaggctgaagaaaaagatgaattactacactttttccaaattgtgactgattctctcttctggcttttgggaggccatgttgaacttattcagaatgtactacaaagtgatcatttcttacatttactgcaagctgacaatgtccaaataggatctgcagtcatgatgatgctacagaatatactacagatcaacagtggtgatttactcagaataggaagaaaagccctgtattcaattttagatgaagttattttcaagcttttttcaactcctagtccagttataagaagtactgctacaaaactcctactgttgatggctgaatcccatcaggaaattttgattttactgagacaaagtacctgctacaaaggactcagacgtctactaagtaaacaggaaactgggactgaattcagtcaagaacttagacagcttgttggccttttaagcccaatggtctatcaggaagtagaagagcagaaactacatcaagcagcatgcttgattcaagcctattggaagggttttcagacaagaaagagattaaagaagcttccatctgctgtgattgctttgcagaggagtttcagatccaaacgatcaaagatgttgctggagataaataggcagaaggaagaagaggacctcaaattacaattgcaacttcaaagacagagagccatgagactttcccgagaattgcagctgagtatgctcgaaatagttcatccaggtcaggtggagaaacactatcgggaaatggaagagaaatcagcactgattatccagaaacattggagagggtacagggaaaggaaaaattttcaccaacagaggcagtctctcatagagtataaagcagctgtcacacttcaaagagcagcgcttaaattcctagcgaagtgccgtaagaaaaagaaactatttgctccttggcgaggactccaagaactcactgatgcacgccgagttgaactgaagaaacgagtggatgactatgtcagaagacatttgggctctccaatgtcagatgtggtcagtagggagctccatgcccaagctcaagaacgactgcaacactactttatgggcagggccctagaagagcgagcccagcagcacagagaagctctgatagcacagatcagcaccaacgttgaacagctaatgaaggcaccaagtctgaaggaggcagaagggaaagaacctgagctcttcctaagtagatccaggcctgtggcagccaaggccaagcaggcccatctcacaaccctgaagcacatacaagcaccctggtggaagaagcttggagaagaatctggagatgagattgatgttccaaaggatgagcttagtatagaattagaaaatttattcattggtggaaccaaaccaccttagtgagtaaccctaagaattgacacaaatctcatattttaggagattatattggttctgcctctggcatgctggtagactagggccatcctaacttattattttccagaggttctcctccagacaagacctgcagtaagcaaagagttatattctacctctctctcaattttctttttcttttctctgtatcctcatcgttagccacacacagatttgtgtggcttttattgtagaactaaacttagcatagtgttctgttgtttacatgaagtgtgtttttctttggtttcttctgttttccaactaaatatttttttctaaataaatattttcaacaattgatttgaaaaatttgtcaggattatttcaacttttcacatttgttatctgaaattcctatttcctgttaacataggaggtgtgtgcagactttattaatgtgaggaaaagaaatgctcaattgaaggacatttccctgttttctataaagcaatggttgaactcattttctattttgttatttctaaaaggaactgcataccaaaaaaatgcattctttctattaaactgtgagaactacat

SEQ ID NO: 134 - protein, 598 aa, Homo sapiens
MKPTGTDPRILSIAAEVAKSPEQNVPVILLKLKEIINITPLGSSELKKIKQDIYCYDLIQYCLLVLSQDYSRIQGGWTTISQLTQILSHCCVGLEPGEDAEEFYNELLPSAAENFLVLGRQLQTCFINAAKAEEKDELLHFFQIVTDSLFWLLGGHVELIQNVLQSDHFLHLLQADNVQIGSAVMMMLQNILQINSGDLLRIGRKALYSILDEVIFKLFSTPSPVIRSTATKLLLLMAESHQEILILLRQSTCYKGLRRLLSKQETGTEFSQELRQLVGLLSPMVYQEVEEQKLHQAACLIQAYWKGFQTRKRLKKLPSAVIALQRSFRSKRSKMLLEINRQKEEEDLKLQLQLQRQRAMRLSRELQLSMLEIVHPGQVEKHYREMEEKSALIIQKHWRGYRERKNFHQQRQSLIEYKAAVTLQRAALKFLAKCRKKKKLFAPWRGLQELTDARRVELKKRVDDYVRRHLGSPMSDVVSRELHAQAQERLQHYFMGRALEERAQQHREALIAQISTNVEQLMKAPSLKEAEGKEPELFLSRSRPVAAKAKQAHLTTLKHIQAPWWKKLGEESGDEIDVPKDELSIELENLFIGGTKPP

SEQ ID NO: 135 - DNA, 10724 bp, Homo sapiens
ctttccaatatccgtcttcggagcgcacgggaatccgccgagctctgcgtgcaggcccttttttcttttgaggttcacattttttgaaattttacgccagggcttttgtaatttcctcccccgcccgctgacggtcctggagtcgctcggggctttaggccggttatgcaacgtgtaccgctcggggctgccggctgcacctccgccgcgcctcgccgctcactgcgctagacccggcgccccgcgtctcgcttcgcgggcagtcagggggccggcgctctgtcgaggtctccagctagagcagggagcccgagcccgagggagtccccggagccgacgaagggcttattagaccctgactcttttctgaggcgcgcagattttgtctttgatcactccctctccgcgggtctacggccgcgcgctttcggcgccggcgatggggagaagacggaggctgtgtctccagctctacttcctgtggctgggctgtgtggtgctctgggcgcagggcacggccggccagcctcagcctcctccgcccaagccgccccggccccagccgccgccgcaacaggttcggtccgctacagcaggctctgaaggcgggtttctagcgcccgagtatcgcgaggagggtgccgcagtggccagccgcgtccgccggcgaggacagcaggacgtgctccgagggcccaacgtgtgcggctccagattccactcctactgctgccctggatggaagacgctccctggaggaaaccagtgcattgtcccgatttgtagaaatagttgtggagatggattttgttcccgtcctaacatgtgtacttgttccagtgggcaaatatcatcaacctgtggatcaaaatcaattcagcagtgcagtgtgagatgcatgaatggtgggacctgtgcagatgaccactgccagtgccagaaaggatatattggaacttattgtggacaacctgtctgtgaaaatggatgtcagaatggtggacgttgcatcggacccaaccgctgtgcttgtgtttatgggttcactggtccacagtgtgaaagagattacaggacaggcccgtgtttcactcaggtcaacaaccagatgtgccaagggcagctgacaggcattgtctgcacgaagactctgtgctgtgccaccattggacgggcgtggggccatccctgtgagatgtgtccagcccagcctcagccctgccgacggggtttcatccccaacatccgcactggagcttgccaagatgttgatgaatgccaggctatcccagggatatgccaaggaggaaactgtatcaatacagtgggctcttttgaatgcagatgccctgctggtcacaaacagagtgaaactactcagaaatgtgaagacattgatgagtgcagcatcattcctgggatatgtgaaactggtgaatgttccaacaccgtgggaagctatttttgtgtttgtccacgtggatatgtaacctcaacagatggctctcgatgcatcgatcagagaacaggcatgtgtttctcgggcctggtgaatggccgctgtgcacaagagctcccggggagaatgacgaaaatgcagtgctgctgtgagcctggccgctgctggggcatcggaaccattcctgaagcctgtcctgtcagaggttctgaggaatatcgcagactttgcatggatggacttccaatgggaggaattccagggagtgctggttccagacctggaggcactgggggaaatggctttgccccaagtggcaatggcaatggctatggcccaggagggacaggcttcatccccatccctggaggcaatggcttttctcctggcgttgggggagccggtgtgggggccgggggacagggacctatcatcactggactaacaattctgaaccagacaatagatatctgtaagcatcatgctaacctttgtttaaatggacgctgtataccaactgtctcaagctaccgatgtgaatgcaacatgggttataagcaggatgcaaatggagattgtatagatgttgatgaatgcacatcaaatccctgcactaatggagattgtgttaacacacctggttcctattattgtaaatgtcatgctggattccagaggactcctaccaagcaagcatgcattgatattgatgagtgcatccagaatggggttctttgtaaaaacggtcgatgcgtgaacacagatggaagtttccagtgcatttgcaatgccggctttgaattaactacagatggaaaaaactgtgttgatcatgatgaatgtacaactaccaacatgtgtttgaatggaatgtgcatcaatgaagatggcagcttcaagtgcatctgcaaaccaggatttgtcttggctccaaatgggcgttactgtactgatgttgatgaatgccagaccccaggaatctgcatgaatgggcactgcatcaacagtgaagggtccttccgctgtgactgtcccccaggcctggctgtgggcatggatggacgtgtgtgtgttgatactcacatgcgcagtacctgctatggaggaatcaagaaaggagtgtgtgtgcgtcctttccccggtgcagtgaccaagtccgaatgctgctgtgccaatccagactatggttttggagaaccctgccagccatgccctgcaaaaaattcagctgaattccacggcctttgtagtagtggagtaggtatcactgtggatggaagagatatcaatgaatgtgctttggatcctgatatatgtgccaatgggatttgtgaaaacttacgtggtagttaccgttgtaattgcaacagtggctatgaaccagatgcctctggaagaaactgtattgacattgatgaatgtttagtaaacagactgctttgtgataacggattgtgccgaaacacgccaggaagttacagctgtacgtgcccaccagggtatgtgttcaggactgagacagagacctgtgaagatataaatgaatgtgaaagcaacccatgtgtcaatggggcctgcagaaacaaccttggatctttcaattgtgaatgttcgcccggcagcaaactcagctccacaggattgatctgtattgacagcctgaaggggacctgttggctcaacatccaggacagccgctgtgaggtgaatattaatggagccactctgaaatctgaatgctgtgccaccctcggagccgcctgggggagcccctgtgagcggtgtgaactagatacagcttgcccaagagggcttgccaggattaaaggtgttacgtgtgaagatgttaatgagtgtgaggtgttccctggcgtttgtccaaatggacgctgtgtcaacagtaagggatcttttcattgcgagtgccctgaaggccttacgttggatgggactggccgtgtatgtttggatattcgcatggagcagtgttacttgaagtgggatgaagatgaatgcatccaccccgttcctggaaagttccgcatggatgcctgctgctgtgctgtcggggcggcttggggcaccgagtgtgaggagtgccccaaacctggcaccaaggaatacgagacgctgtgcccccgcggggctggctttgctaaccgaggggatgttcttactgggcggccattttacaaagacatcaatgaatgcaaagcatttcctgggatgtgcacttatgggaagtgcagaaatacaatcggaagcttcaaatgccgttgcaatagtggctttgctctagacatggaggaaagaaactgcacggacatcgacgagtgcaggatttctcctgacctctgtggcagtggaatctgcgtcaatacaccgggcagctttgagtgcgagtgcttcgaaggctatgaaagtggcttcatgatgatgaagaactgcatggacattgacgaatgtgaacgtaaccctctcctttgtaggggtggcacctgtgtgaacactgagggcagctttcagtgtgactgcccactgggacacgagctgtcaccatcccgtgaggactgtgtggatattaatgaatgctccctgagtgacaatctctgcagaaatggaaaatgtgtgaacatgattggaacctatcagtgctcttgcaatcctggatatcaggctacgccagaccgccagggctgtacagatattgatgaatgtatgataatgaacggaggctgtgacacccagtgcacaaattcagagggaagctacgaatgcagctgcagtgagggttatgccctgatgccagatgggagatcgtgtgcagacattgatgaatgtgaaaacaatcctgatatctgtgatggcggccagtgtaccaacattcctggagagtatcgctgcctctgctatgatggcttcatggcttccatggacatgaaaacatgcattgatgtcaatgaatgtgacctaaattcaaatatctgcatgtttggggaatgtgagaacacaaagggatccttcatttgccactgtcagctgggttactcagtgaagaaggggaccacaggatgtacagatgtggatgagtgtgaaattggtgctcataactgcgacatgcatgcctcatgtctgaatatcccaggaagcttcaagtgtagctgcagagaaggctggattggaaacggcatcaagtgtattgatctggacgaatgttctaatggaacccaccagtgtagcatcaatgctcagtgtgtaaataccccgggctcataccgctgtgcctgctccgaaggtttcactggtgatggctttacctgctcagatgttgatgagtgtgcagaaaacataaacctctgtgagaacggacagtgccttaatgtcccgggtgcatatcgctgcgagtgtgagatgggcttcactccagcctcagacagcagatcctgccaagatattgatgaatgctccttccaaaacatttgtgtctttggaacatgtaataacctgcctggaatgtttcattgcatctgcgatgatggttatgaattggacagaacaggagggaactgtacagatattgatgagtgtgcagatcctataaactgtgtcaatggcctatgtgtcaacacgcctggtcgctatgagtgtaactgcccacccgattttcagttgaacccaactggtgtgggttgtgttgacaaccgtgtgggcaactgctacctgaagtttggacctcgaggagatgggagtctgtcttgcaacaccgagatcggggtgggcgtcagtcgctcttcatgctgctgctctctgggaaaggcctggggaaacccctgtgagacatgcccccctgtcaatagcactgaatattacaccctgtgtcccggaggtgaaggcttcagacctaaccccatcacaatcattttagaagacattgacgaatgccaggagttaccaggtctctgccagggtggaaactgcatcaacacttttgggagcttccagtgtgagtgcccacaaggctactacctcagcgaggatacccgcatctgtgaagatattgatgagtgttttgcacatcctggtgtgtgtgggcctgggacctgctataacaccctgggaaattacacctgcatttgcccacctgagtacatgcaggtcaatggaggccacaactgcatggacatgagaaaaagcttttgctaccgaagctataatggaaccacttgtgagaatgagttgcctttcaatgtgacaaaaaggatgtgctgctgcacatataatgtgggcaaagcctggaacaaaccttgtgaaccatgcccaactccaggaacagctgactttaaaaccatatgtggaaatattcctggattcacctttgacattcacacaggaaaagctgttgacattgatgaatgtaaagagattccaggcatttgtgcaaatggtgtgtgcattaaccagattggcagtttccgctgtgaatgccctacaggattcagttacaatgacctgctgttggtttgtgaagatatagatgagtgcagcaatggtgataatctctgccagcggaatgcagactgcatcaatagtcctggtagttaccgctgtgaatgtgccgcgggtttcaaactttcacccaatggggcctgtgtagatcgcaatgaatgtttagaaattcctaacgtttgcagtcatggcttgtgtgttgatctgcaaggaagttaccagtgcatctgccacaatggctttaaggcttctcaggaccagaccatgtgcatggatgttgatgagtgcgagcggcatccatgtggaaatggaacttgtaaaaacaccgttggatcctataactgtctgtgctacccagggtttgaactcactcataataatgattgcctggacatagatgagtgcagttccttttttggtcaggtgtgcagaaatggacgttgttttaatgaaattggttctttcaagtgtctatgtaacgaaggttatgaacttaccccagatggcaaaaactgtatagacactaatgagtgtgtcgcccttcccggctcttgctctcctggtacctgtcagaatttggagggatccttcagatgcatctgtcccccagggtatgaagtaaaaagcgagaactgcattgatataaatgaatgtgatgaagatcccaacatttgtctttttggttcctgtactaatactccagggggcttccagtgcctctgcccccctggctttgtactatctgataatggacggagatgctttgatactcgccagagcttctgcttcacaaattttgaaaatggaaagtgttctgtacccaaagctttcaacaccacaaaagcaaaatgctgctgtagtaagatgccaggagagggctggggggacccctgtgagctgtgccccaaagacgatgaagttgcatttcaggatttgtgtccatatggccatggaactgtccctagtcttcatgatacacgtgaagatgtcaatgagtgtcttgagagcccaggcatttgttcaaatggtcaatgtatcaacaccgacggatcttttcgctgtgaatgtccaatgggctacaaccttgactacactggagtacgctgtgtggatactgatgagtgttcaatcggcaatccgtgtggaaatggtacatgcaccaatgttattgggagttttgaatgcaattgcaatgaaggctttgagccagggcccatgatgaattgtgaagatatcaacgaatgtgcccagaacccactgctgtgtgctttccgctgcatgaacacttttgggtcctatgaatgcacgtgcccgattggctatgccctcagggaagatcaaaagatgtgcaaagatctggatgaatgtgctgaagggttacacgactgtgaatctaggggcatgatgtgtaagaatctaatcggcaccttcatgtgcatctgccctcctggaatggcccgaaggcccgatggagaaggctgtgtagatgaaaatgaatgcaggaccaagccaggaatctgtgaaaatggacgttgtgttaacattattggaagctatagatgtgagtgtaatgaaggattccagtcaagttcttcaggcactgaatgccttgacaatcgacagggtctctgctttgcagaggtactgcagacaatatgtcaaatggcatccagtagtcgcaatctcgtcactaagtcagaatgctgctgtgatggtgggcgaggctggggccaccagtgcgagctttgcccacttcctggaactgcccagtacaaaaagatatgtcctcatggcccaggatatacaactgatggaagagatattgatgaatgtaaggtaatgccaaacctctgcaccaatggtcagtgcatcaataccatgggctcattccgatgcttctgcaaggttggctacaccacagacatcagtggaacctcttgtatagaccttgatgaatgctcccagtccccgaaaccatgcaactacatctgcaagaacactgaggggagttatcagtgttcatgtccgagggggtatgtcctgcaagaggatggaaagacatgcaaagaccttgatgaatgtcaaacaaagcagcataactgccagttcctctgtgtcaacaccctgggggggtttacctgtaaatgtccacctggtttcacacagcatcacactgcttgtatcgacaacaacgaatgtgggtctcaaccttcgctttgtggagcaaagggaatctgtcaaaacactccaggcagtttcagctgtgaatgccaaagagggttctctcttgatgccaccggactgaactgtgaagatgttgatgaatgtgatgggaaccacaggtgccaacacggctgccagaacatcctgggtggctacagatgtggctgcccccaaggctacatccagcactaccagtggaatcagtgtgtcgatgagaatgaatgctccaatcccaatgcctgtggctctgcttcctgctacaacaccctggggagttacaagtgcgcctgcccctcggggttctccttcgaccagttctccagtgcctgccacgacgtgaatgagtgctcgtcctccaagaacccctgcaattacggctgctctaacacggaggggggctacctctgtggctgcccccctgggtattacagagtgggacaaggccactgtgtctcaggaatgggatttaacaaggggcagtacctgtcactggatacagaggtcgatgaggaaaatgctctgtccccagaagcatgctacgagtgcaaaatcaacggctattctaagaaagacagcaggcagaagagaagtattcatgaacctgatcccactgctgttgaacagatcagcctagagagtgtcgacatggacagccccgtcaacatgaagttcaacctctcccacctcggctctaaggagcacatcctggaactaaggcccgccatccagcccctcaacaaccacatccgttatgtcatctctcaagggaacgatgacagcgtcttccgcatccaccaaaggaatgggctcagctacttgcacacggccaagaagaagctcatgcccggcacatacacactggaaatcactagcatccctctctacaagaagaaggagcttaagaaactggaagagagcaatgaggatgactacctcctaggggagcttggggaggctctcagaatgaggctgcagattcagctctattaacccttcacagacttgggcccaggctcaaatcctagcacagccagtctgcagaagcatttgaaaagtcaaggactaattttaaagaggaaaaataataataactcttgtttctttcctccctgtcttagactttgaatgttgaccctcacagggagggataatttagactctggtatggccaaagatttgagcacaaaggcaaccgtggttactgtattttttatataacttcattttaaaatatattaaaagaaacctaaatgttcaagatatcagcatatggcactaaatgcacaaaaataatgtgagctttttttttttttcctgttagcagtctgtaacactttgggtattttgctatagttgctaattaaaaaaatatagatgtttatttatttttaatgcagtaatatatggagaaatgaacaaactatgtaaacaaaaagggaaactcacttgtttttctttagatttataaatttgagctattttttttagaggtgctttttaaaaatccaatagatacaagagatgtttcctttggttttctgccagtcatccagctgatacacacctgatgattttaaagaaagccacacagagctgaatgggcagtgtaatcaataatttaaaaaacatgaatgtcattagatcctttataacgtagatcgaagccaaagcagctcatttgtgacaacatttcatatcaccagacacaccaggcaacagaagttgaagcacaaccactgtagcaaaataccttgactgcttgtgagaccattagcattgcaggccaaaccgtactgtatttccttctcataacctcaaggaaccatatgtgctacccacaacacctcattcttacccagggtgcgctgcgtcctcatggtactgtaggcagctgaagaaccgccgttcccttgaaagggaacacctggcattctgtggtgtttcgtgctgtcttaaataatggtgcatttattatgttcaagttatttcaggattgccatatgtgcaaacaaatcatgcaatgcagccaaggaatatatgttgttgttgttgttttaaacccattttttttttagaattttcattaatactgtagttatacaccatatgcctcattttatcatagcctattgtgtatgaaagatgtttgtacaatgaattgatgtttagtttgctttagtcatttaaaaagatattgtaccaggatgtgctattaagagcacgtatccattattcttctcaacccaagaacctgtttcctggaccagtgaccaaacctcatatgtgaaatggccaaagcacatgcaggctcctggttgttcctctcaaacctgtgctgaccaaagattagtaaccagttatacccagtattttgaggttttattgtttttttaataactaaaaagaaaaaaggaacagtgtaaatttgtaatcaagagtttgtgaggaaaaacttatggtttttggttttgtttgtttttgtaggtctgtgtatcaaatatgacacttttcttgcaataaagcttattttggggta

SEQ ID NO: 136 - protein, 2912 aa, Homo sapiens
MGRRRRLCLQLYFLWLGCVVLWAQGTAGQPQPPPPKPPRPQPPPQQVRSATAGSEGGFLAPEYREEGAAVASRVRRRGQQDVLRGPNVCGSRFHSYCCPGWKTLPGGNQCIVPICRNSCGDGFCSRPNMCTCSSGQISSTCGSKSIQQCSVRCMNGGTCADDHCQCQKGYIGTYCGQPVCENGCQNGGRCIGPNRCACVYGFTGPQCERDYRTGPCFTQVNNQMCQGQLTGIVCTKTLCCATIGRAWGHPCEMCPAQPQPCRRGFIPNIRTGACQDVDECQAIPGICQGGNCINTVGSFECRCPAGHKQSETTQKCEDIDECSIIPGICETGECSNTVGSYFCVCPRGYVTSTDGSRCIDQRTGMCFSGLVNGRCAQELPGRMTKMQCCCEPGRCWGIGTIPEACPVRGSEEYRRLCMDGLPMGGIPGSAGSRPGGTGGNGFAPSGNGNGYGPGGTGFIPIPGGNGFSPGVGGAGVGAGGQGPIITGLTILNQTIDICKHHANLCLNGRCIPTVSSYRCECNMGYKQDANGDCIDVDECTSNPCTNGDCVNTPGSYYCKCHAGFQRTPTKQACIDIDECIQNGVLCKNGRCVNTDGSFQCICNAGFELTTDGKNCVDHDECTTTNMCLNGMCINEDGSFKCICKPGFVLAPNGRYCTDVDECQTPGICMNGHCINSEGSFRCDCPPGLAVGMDGRVCVDTHMRSTCYGGIKKGVCVRPFPGAVTKSECCCANPDYGFGEPCQPCPAKNSAEFHGLCSSGVGITVDGRDINECALDPDICANGICENLRGSYRCNCNSGYEPDASGRNCIDIDECLVNRLLCDNGLCRNTPGSYSCTCPPGYVFRTETETCEDINECESNPCVNGACRNNLGSFNCECSPGSKLSSTGLICIDSLKGTCWLNIQDSRCEVNINGATLKSECCATLGAAWGSPCERCELDTACPRGLARIKGVTCEDVNECEVFPGVCPNGRCVNSKGSFHCECPEGLTLDGTGRVCLDIRMEQCYLKWDEDECIHPVPGKFRMDACCCAVGAAWGTECEECPKPGTKEYETLCPRGAGFANRGDVLTGRPFYKDINECKAFPGMCTYGKCRNTIGSFKCRCNSGFALDMEERNCTDIDECRISPDLCGSGICVNTPGSFECECFEGYESGFMMMKNCMDIDECERNPLLCRGGTCVNTEGSFQCDCPLGHELSPSREDCVDINECSLSDNLCRNGKCVNMIGTYQCSCNPGYQATPDRQGCTDIDECMIMNGGCDTQCTNSEGSYECSCSEGYALMPDGRSCADIDECENNPDICDGGQCTNIPGEYRCLCYDGFMASMDMKTCIDVNECDLNSNICMFGECENTKGSFICHCQLGYSVKKGTTGCTDVDECEIGAHNCDMHASCLNIPGSFKCSCREGWIGNGIKCIDLDECSNGTHQCSINAQCVNTPGSYRCACSEGFTGDGFTCSDVDECAENINLCENGQCLNVPGAYRCECEMGFTPASDSRSCQDIDECSFQNICVFGTCNNLPGMFHCICDDGYELDRTGGNCTDIDECADPINCVNGLCVNTPGRYECNCPPDFQLNPTGVGCVDNRVGNCYLKFGPRGDGSLSCNTEIGVGVSRSSCCCSLGKAWGNPCETCPPVNSTEYYTLCPGGEGFRPNPITIILEDIDECQELPGLCQGGNCINTFGSFQCECPQGYYLSEDTRICEDIDECFAHPGVCGPGTCYNTLGNYTCICPPEYMQVNGGHNCMDMRKSFCYRSYNGTTCENELPFNVTKRMCCCTYNVGKAWNKPCEPCPTPGTADFKTICGNIPGFTFDIHTGKAVDIDECKEIPGICANGVCINQIGSFRCECPTGFSYNDLLLVCEDIDECSNGDNLCQRNADCINSPGSYRCECAAGFKLSPNGACVDRNECLEIPNVCSHGLCVDLQGSYQCICHNGFKASQDQTMCMDVDECERHPCGNGTCKNTVGSYNCLCYPGFELTHNNDCLDIDECSSFFGQVCRNGRCFNEIGSFKCLCNEGYELTPDGKNCIDTNECVALPGSCSPGTCQNLEGSFRCICPPGYEVKSENCIDINECDEDPNICLFGSCTNTPGGFQCLCPPGFVLSDNGRRCFDTRQSFCFTNFENGKCSVPKAFNTTKAKCCCSKMPGEGWGDPCELCPKDDEVAFQDLCPYGHGTVPSLHDTREDVNECLESPGICSNGQCINTDGSFRCECPMGYNLDYTGVRCVDTDECSIGNPCGNGTCTNVIGSFECNCNEGFEPGPMMNCEDINECAQNPLLCAFRCMNTFGSYECTCPIGYALREDQKMCKDLDECAEGLHDCESRGMMCKNLIGTFMCICPPGMARRPDGEGCVDENECRTKPGICENGRCVNIIGSYRCECNEGFQSSSSGTECLDNRQGLCFAEVLQTICQMASSSRNLVTKSECCCDGGRGWGHQCELCPLPGTAQYKKICPHGPGYTTDGRDIDECKVMPNLCTNGQCINTMGSFRCFCKVGYTTDISGTSCIDLDECSQSPKPCNYICKNTEGSYQCSCPRGYVLQEDGKTCKDLDECQTKQHNCQFLCVNTLGGFTCKCPPGFTQHHTACIDNNECGSQPSLCGAKGICQNTPGSFSCECQRGFSLDATGLNCEDVDECDGNHRCQHGCQNILGGYRCGCPQGYIQHYQWNQCVDENECSNPNACGSASCYNTLGSYKCACPSGFSFDQFSSACHDVNECSSSKNPCNYGCSNTEGGYLCGCPPGYYRVGQGHCVSGMGFNKGQYLSLDTEVDEENALSPEACYECKINGYSKKDSRQKRSIHEPDPTAVEQISLESVDMDSPVNMKFNLSHLGSKEHILELRPAIQPLNNHIRYVISQGNDDSVFRIHQRNGLSYLHTAKKKLMPGTYTLEITSIPLYKKKELKKLEESNEDDYLLGELGEALRMRLQIQLY

SEQ ID NO: 137 - DNA, 3068 bp, Homo sapiens
cacatggaaactgttcttaaagctgctgggccctgaaattttactcagcagtttgaaatcaagacatagcttttctcattcaccctcccacttggggctaatgcacagacatgaacatctattgaggaaaaccacaaaaaacttcaaaacagctacaacggtatcctaagaatatttcaattaaatattagtatgtctgctgaaggcacttaattattaagaaacttaaaattatcaatctttcttgaatttctgatagagaagtaaaactattttccaaaactatttttcagaatgttcactgatacataaaaactgctagcatctaattaaagatcactaagggttaaatactgttctctggcccttactgcgcacaccctgccaaaacatcctctaagcttttaaatattgcttcgatggtctgaatttttatttccagggaaaaagagagttttgtcccacagtcagcaggccactagtttattaacttccagtcaccttgatttttgctaaaatgaagactctgcagtctacacttctcctgttactgcttgtgcctctgataaagccagcaccaccaacccagcaggactcacgcattatctatgattatggaacagataattttgaagaatccatatttagccaagattatgaggataaatacctggatggaaaaaatattaaggaaaaagaaactgtgataatacccaatgagaaaagtcttcaattacaaaaagatgaggcaataacaccattacctcccaagaaagaaaatgatgaaatgcccacgtgtctgctgtgtgtttgtttaagtggctctgtatactgtgaagaagttgacattgatgctgtaccacccttaccaaaggaatcagcctatctttacgcacgattcaacaaaattaaaaagctgactgccaaagattttgcagacatacctaacttaagaagactcgattttacaggaaatttgatagaagatatagaagatggtactttttcaaaactttctctgttagaagaactttcacttgctgaaaatcaactactaaaacttccagttcttcctcccaagctcactttatttaatgcaaaatacaacaaaatcaagagtaggggaatcaaagcaaatgcattcaaaaaactgaataacctcaccttcctctacttggaccataatgccctggaatccgtgcctcttaatttaccagaaagtctacgtgtaattcatcttcagttcaacaacatagcttcaattacagatgacacattctgcaaggctaatgacaccagttacatccgggaccgcattgaagagatacgcctggagggcaatccaatcgtcctgggaaagcatccaaacagttttatttgcttaaaaagattaccgatagggtcatacttttaacctctattggtacaacatataaatgaaagtacacctacactaatagtctgtctcaacaatgagtaaaggaacttaagtattggtttaatattaaccttgtatctcattttgaaggaatttaatattttaagcaaggatgttcaaaatcttacatataataagtaaaaagtaagactgaatgtctacgttcgaaacaaagtaatatgaaaatatttaaacagcattacaaaatcctagtttatactagactaccatttaaaaatcatgtttttatataaatgcccaaatttgagatgcattattcctattactaatgatgtaagtacgaggataaatccaagaaactttcaactctttgcctttcctggcctttactggatcccaaaagcatttaaggtacatgttccaaaaactttgaaaagctaaatgtttcccatgatcgctcattcttcttttatgattcatacgttattccttataaagtaagaactttgttttcctcctatcaaggcagctattttattaaatttttcacttagtctgagaaatagcagatagtctcatatttaggaaaactttccaaataaaataaatgttattctctgataaagagctaatacagaaatgttcaagttattttactttctggtaatgtcttcagtaaaatattttctttatctaaatattaacattctaagtctaccaaaaaaagttttaaactcaagcaggccaaaaccaatatgcttataagaaataatgaaaagttcatccatttctgataaagttctctatggcaaagtctttcaaatacgagataactgcaaaatattttccttttatactacagaaatgagaatctcatcaataaattagttcaagcataagatgaaaacagaatattctgtggtgccagtgcacactaccttcccacccatacacatccatgttcactgtaacaaactgaatattcacaataaagcttctgagtaacactttctgattactcatgataaactgacatggctaactgcaagaattaaatcttctatctgagagtaataatttatgatgactcagtggtgccagagtaaagtttctaaaataacattcctctcacttgtaccccactaaaagtattagactacacattacattgaagttaaacacaaaattatcagtgttttagaaacatgagtccggactgtgtaagtaaaagtacaaacattatttccaccataaagtatgtattgaaatcaagttgtctctgtgtacagaatacatacttattcccatttttaagcatttgcttctgttttccctacctagaatgtcagatgtttttcagttatctccccatttgtcaaagttgacctcaagataacatttttcattaaagcatctgagatctaagaacacaattattattctaacaatgattattagctcattcacttattttgataactaatgatcacagctattatactactttctcgttattttgtgtgcatgcctcatttccctgacttaaacctcactgagagcgcaaaatgcagctttatactttttactttcaattgcctagcacaatagtgagtacatttgaattgaatatataataaatattgcaaaataaaatccatctaaatagaaa

SEQ ID NO: 138 - protein, 298 aa, Homo sapiens
MKTLQSTLLLLLLVPLIKPAPPTQQDSRIIYDYGTDNFEESIFSQDYEDKYLDGKNIKEKETVIIPNEKSLQLQKDEAITPLPPKKENDEMPTCLLCVCLSGSVYCEEVDIDAVPPLPKESAYLYARFNKIKKLTAKDFADIPNLRRLDFTGNLIEDIEDGTFSKLSLLEELSLAENQLLKLPVLPPKLTLFNAKYNKIKSRGIKANAFKKLNNLTFLYLDHNALESVPLNLPESLRVIHLQFNNIASITDDTFCKANDTSYIRDRIEEIRLEGNPIVLGKHPNSFICLKRLPIGSYF

SEQ ID NO: 139 - DNA, 2542 bp, Homo sapiens
tttagttttgtttgcctttcacattagaggaaattcttgccacacctcaaaccaaaattaaggggaaaagaaagaagtaagccacataaatctgaccaagaacacaagcatcttaatttgaatccacaaagtttcatgtaatgaaaagaaatacataattttaattcaacccgagtgttttccaagaagattgtatttgcttaaattgctacagtaattcaagagacagccctgtctggacacagagttactgtggatttttaagagactcagttaaagaatttaggaatttctgattcatttaaaggatttacaaattcatcaacccctgaaaactaaagcaaattgaacaggaaaaaaaaaaagaagatgggttttttaagtccaatatatgttattttcttcttttttggagtcaaagtacattgccaatatgaaacttatcagtgggatgaagactatgaccaagagccagatgatgattaccaaacaggattcccatttcgtcaaaatgtagactacggagttccttttcatcagtatactttaggctgtgtcagtgaatgcttctgtccaactaactttccatcatcaatgtactgtgataatcgcaaactcaagactatcccaaatattccgatgcacattcagcaactctaccttcagttcaatgaaattgaggctgtgactgcaaattcattcatcaatgcaactcatcttaaagaaattaacctcagccacaacaaaattaaatctcaaaagattgattatggtgtgtttgctaagcttccaaatctactacaacttcatctagagcataataatttagaagaatttccatttcctcttcctaaatctctggaaagactccttcttggttacaatgaaatctccaaactgcagacaaatgctatggatgggctagtaaacttgaccatgcttgatctctgttataattatcttcatgattctctgctaaaagacaaaatctttgccaaaatggaaaaactaatgcagctcaacctctgcagtaacagattagaatcaatgcctcctggtttgccttcttcacttatgtatctgtctttagaaaataattcaatttcttctatacccgaaaaatacttcgacaaacttccaaaacttcatactctaagaatgtcacacaacaaactacaagacatcccatataatatttttaatcttcccaacattgtagaactcagtgttggacacaacaaattgaagcaagcattctatattccaagaaatttggaacacctatacctacaaaataatgaaatagaaaagatgaatcttacagtgatgtgtccttctattgacccactacattaccaccatttaacatacattcgtgtggaccaaaataaactaaaagaaccaataagctcatacatcttcttctgcttccctcatatacacactatttattatggtgaacaacgaagcactaatggtcaaacaatacaactaaagacacaagttttcaggagatttccagatgatgatgatgaaagtgaagatcacgatgatcctgacaatgctcatgagagcccagaacaagaaggagcagaagggcactttgaccttcattattatgaaaatcaagaatagcaagaaactatataggtatacacttacgacttcacaaaacctatacttaatatagtaaatctaagtaaacatgtattactcaaagtaatatatttagaattatgtattagtataagatcagaattgaatttaagttgttggtgacatctgcatcatttcataggattagaacttactcaaaataatgtaaatctttaaaaatataaattagaatgacaagtgggaatcataaattaaacgttaatggtttcttatgctctttttaaatatagaaatatcatgttaaagaaagtgagtgtatcatttctattaacagtaatttttctaaaaatgaggaaggaagtagcattagcagtaaagacccacaggccatgacctttttgatcactctgaggacaatatttaaatgacaggaaggtatattaatgtaacaagcattcatttaaggaatagaccattttctctgacctcttcttcaggaaagctttcacactggtatttgtgatctcaccattatgacatccatccccctagctcaccacatagcacatagaatgatatttttgatttgtaagaggccatccaggtactaaggacccaaggcatacagattcacaaaattaactaatctttttgcctcagaataccaaaacaacaaaattataaagctgtatttggacaactaaaaaacaccaaactatctcattgcaatttgtattttagcagatttcagcaactatcctaaacaatgttattgtgttccattttaactgggataaatgtttttgtaaaaatacaaccatagaaaggcctctttgttacaaaatgatttgcaaagaaataactgctttgtttgcaagattaaattagtgttggcaaaataaagttctaaagataatactaaaca

SEQ ID NO: 140 - protein, 421 aa, Homo sapiens
MGFLSPIYVIFFFFGVKVHCQYETYQWDEDYDQEPDDDYQTGFPFRQNVDYGVPFHQYTLGCVSECFCPTNFPSSMYCDNRKLKTIPNIPMHIQQLYLQFNEIEAVTANSFINATHLKEINLSHNKIKSQKIDYGVFAKLPNLLQLHLEHNNLEEFPFPLPKSLERLLLGYNEISKLQTNAMDGLVNLTMLDLCYNYLHDSLLKDKIFAKMEKLMQLNLCSNRLESMPPGLPSSLMYLSLENNSISSIPEKYFDKLPKLHTLRMSHNKLQDIPYNIFNLPNIVELSVGHNKLKQAFYIPRNLEHLYLQNNEIEKMNLTVMCPSIDPLHYHHLTYIRVDQNKLKEPISSYIFFCFPHIHTIYYGEQRSTNGQTIQLKTQVFRRFPDDDDESEDHDDPDNAHESPEQEGAEGHFDLHYYENQE

SEQ ID NO: 141 - DNA, 2541 bp, Homo sapiens
gatacaaacagtgatggaaaacacatgagcagtaacaagttttaatcttgctcctcagtactaacatggactaatctgtgggagcagtttattccagtatcacccagggtgcagccacaccaggactgtgttgaagggtgttttttttcttttaaatgtaatacctcctcatcttttcttcttacacagtgtctgagaacatttacattatagataagtagtacatggtggataacttctacttttaggaggactactctcttctgacagtcctagactggtcttctacactaagacaccatgaaggagtatgtgctcctattattcctggctttgtgctctgccaaacccttctttagcccttcacacatcgcactgaagaatatgatgctgaaggatatggaagacacagatgatgatgatgatgatgatgatgatgatgatgatgatgaggacaactctctttttccaacaagagagccaagaagccatttttttccatttgatctgtttccaatgtgtccatttggatgtcagtgctattcacgagttgtacattgctcagatttaggtttgacctcagtcccaaccaacattccatttgatactcgaatgcttgatcttcaaaacaataaaattaaggaaatcaaagaaaatgattttaaaggactcacttcactttatggtctgatcctgaacaacaacaagctaacgaagattcacccaaaagcctttctaaccacaaagaagttgcgaaggctgtatctgtcccacaatcaactaagtgaaataccacttaatcttcccaaatcattagcagaactcagaattcatgaaaataaagttaagaaaatacaaaaggacacattcaaaggaatgaatgctttacacgttttggaaatgagtgcaaaccctcttgataataatgggatagagccaggggcatttgaaggggtgacggtgttccatatcagaattgcagaagcaaaactgacctcagttcctaaaggcttaccaccaactttattggagcttcacttagattataataaaatttcaacagtggaacttgaggattttaaacgatacaaagaactacaaaggctgggcctaggaaacaacaaaatcacagatatcgaaaatgggagtcttgctaacataccacgtgtgagagaaatacatttggaaaacaataaactaaaaaaaatcccttcaggattaccagagttgaaatacctccagataatcttccttcattctaattcaattgcaagagtgggagtaaatgacttctgtccaacagtgccaaagatgaagaaatctttatacagtgcaataagtttattcaacaacccggtgaaatactgggaaatgcaacctgcaacatttcgttgtgttttgagcagaatgagtgttcagcttgggaactttggaatgtaataattagtaattggtaatgtccatttaatataagattcaaaaatccctacatttggaatacttgaactctattaataatggtagtattatatatacaagcaaatatctattctcaagtggtaagtccactgacttattttatgacaagaaatttcaacggaattttgccaaactattgatacataagggttgagagaaacaagcatctattgcagtttctttttgcgtacaaatgatcttacataaatctcatgcttgaccattcctttcttcataacaaaaaagtaagatattcggtatttaacactttgttatcaagcatattttaaaaagaactgtactgtaaatggaatgcttgacttagcaaaatttgtgctctttcatttgctgttagaaaaacagaattaacaaagacagtaatgtgaagagtgcattacactattcttattctttagtaacttgggtagtactgtaatatttttaatcatcttaaagtatgatttgatataatcttattgaaattaccttatcatgtcttagagcccgtctttatgtttaaaactaatttcttaaaataaagccttcagtaaatgttcattaccaacttgataaatgctactcataagagctggtttggggctatagcatatgcttttttttttttaattattacctgatttaaaaatctctgtaaaaacgtgtagtgtttcataaaatctgtaactcgcattttaatgatccgctattataagcttttaatagcatgaaaattgttaggctatataacattgccacttcaactctaaggaatatttttgagatatccctttggaagaccttgcttggaagagcctggacactaacaattctacaccaaattgtctcttcaaatacgtatggactggataactctgagaaacacatctagtataactgaataagcagagcatcaaattaaacagacagaaaccgaaagctctatataaatgctcagagttctttatgtatttcttattggcattcaacatatgtaaaatcagaaaacagggaaattttcattaaaaatattggtttgaaataaaaaaaaaaaaaaaaaaaaaa

SEQ ID NO: 142 - protein, 379 aa, Homo sapiens
MKEYVLLLFLALCSAKPFFSPSHIALKNMMLKDMEDTDDDDDDDDDDDDDEDNSLFPTREPRSHFFPFDLFPMCPFGCQCYSRVVHCSDLGLTSVPTNIPFDTRMLDLQNNKIKEIKENDFKGLTSLYGLILNNNKLTKIHPKAFLTTKKLRRLYLSHNQLSEIPLNLPKSLAELRIHENKVKKIQKDTFKGMNALHVLEMSANPLDNNGIEPGAFEGVTVFHIRIAEAKLTSVPKGLPPTLLELHLDYNKISTVELEDFKRYKELQRLGLGNNKITDIENGSLANIPRVREIHLENNKLKKIPSGLPELKYLQIIFLHSNSIARVGVNDFCPTVPKMKKSLYSAISLFNNPVKYWEMQPATFRCVLSRMSVQLGNFGM

SEQ ID NO: 143 - DNA, 4615 bp, Homo sapiens
ggacacaaccctgagatttatccctcacaatgcggaaagacagacttcttcatttatgtcttgtgctacttcttatcctgctttctgccagtgactcaaactctacagaaccgcagtatatggtgctggtcccctccctgctccacactgaggcccctaagaagggctgtgtccttctgagccacctgaatgagacagtgactgtaagtgcttccttggagtctggcagggaaaacaggagcctcttcactgacctggtggcggagaaggacttattccactgtgtctccttcactctcccaaggatctcagcctcttcagaggtggcattccttagcatccagataaaggggcctacgcaagatttcaggaagaggaacacagttctggtactgaacacccaaagtctggtctttgtccagacagacaaacccatgtataaaccaggacagacagtaagattccgtgttgtctccgtggatgaaaattttcgccctcgaaatgaactgattccactgatataccttgagaacccaagaagaaatcgaattgcacaatggcagagtctcaagctagaagctggcatcaatcagttgtcctttcccctctcatcagagcccattcagggctcctacagggtggtggtacagacagaatcaggtggaaggatacagcaccccttcaccgtggaggaatttgtgcttcccaagtttgaggtcaaagttcaggtgccaaagataatcagtatcatggatgaaaaagtgaacataacagtctgtggagaatacacttatgggaagcctgtcccaggacttgcaactgtgagcctgtgtagaaaattatctcgtgttcttaattgtgacaagcaggaggtctgtgaggaattcagtcaacagcttaacagcaatggctgcatcacccaacaagtacacaccaaaatgctccagattacaaatacgggctttgaaatgaagcttagagtggaagccaggatcagagaagaggggacagacctggaagtcactgcaaacaggatcagtgaaatcacaaacattgtatccaaactcaaattcgtgaaagtggattcacactttagacaaggaatccccttttttgcacaggtgcttctggtggatggaaaaggtgtgcccatccccaataaactcttcttcatctctgtgaatgacgccaattattactccaatgcaaccaccaatgagcagggtcttgcacagttttcaatcaatactaccagtatctcggttaataaactttttgtccgggttttcactgtgcatcccaacttgtgttttcactattcatgggtagcagaagaccaccagggtgctcagcacactgcaaatcgtgttttctccttaagtggaagttacattcacctggagcctgtggctggtaccctgccctgtggccacacggagactatcacggcacactatacactgaatagacaggccatgggagagttatcggagctcagtttccattacctgatcatggctaagggagtcatcgtcagatctggaacccacactctgcctgtggagtcaggagacatgaaaggcagttttgccttatccttccctgtggagtcagacgttgcccccattgcacgaatgttcatctttgccattttaccagatggagaagttgttggagactctgaaaaatttgagattgaaaactgtctagccaacaaggtggatttgagcttcagcccagcacaaagtcccccagcctcacatgcccacctgcaagtagcagctgctccgcagtccctctgtgcccttcgtgctgtggaccaaagtgtgctgctcatgaagcctgaggctgagctctctgtgtcctcagtatataatctgctaactgtgaaggatctcaccaattttcctgacaatgtggaccagcaggaggaagaacaaggacactgtccccgtcctttcttcattcataatggagccatctatgttcccttatcaagtaatgaagcagatatttatagcttcctcaaggggatgggattgaaggtgttcactaactcaaaaatccgaaaaccaaagtcgtgttcagtcatcccttccgtgtctgcaggagcagtaggtcaaggatactatggagcaggtctaggagtagtagagagaccatatgttcctcaattaggcacatataatgtgatacccttaaataatgaacaaagttcagggccagtccctgaaacggtgcgaagctattttcctgagacttggatctgggagttggtggcagtgaactcatcaggtgtggctgaggtaggagtaacagtccctgacaccatcaccgagtggaaggcaggggccttctgcctgtccgaagatgctggacttggtatctcttccactgcctctctccgagccttccagcccttctttgtggagctcacaatgccttactctgtgattcgtggagaggtcttcacactcaaggccacggtcctaaactaccttcccaaatgcatccgggtcagtgtgcagctgaaagcctctccagccttcctagcttcccaaaatacaaagggagaagaatcctattgtatctgtggaaatgagagacaaaccttgtcttggacagtgactcctaaaactctggggaatgtgaacttctcagtgagtgcagaggcaatgcagtccttagaactctgtggaaatgaggttgttgaggtccctgagattaaaagaaaagacacagtcatcaaaaccctgttggtggaggctgaaggtattgagcaagaaaagactttcagttctatgacctgtgcctcaggtgctaatgtgtctgagcagttgtccttgaagctcccatcaaatgtggtcaaagaatctgccagagcttctttctcagttctgggtgacatattaggttctgctatgcaaaatatacaaaatctcctccagatgccatatggctgtggagaacagaacatggtcctatttgctcctaacatctatgtcttgaactatctgaatgaaacccagcagctgacgcaggagatcaaggccaaggccgttggctatctcatcactggttaccagagacagctgaactacaaacaccaagatggctcctacagcacctttggggaacgatatggcaggaaccagggcaacacttggctcacagcttttgtactgaagactttcgcccaggctcgatcctacatcttcattgatgaagcacacattacccaatctctcacgtggctctcccagatgcagaaggacaatggctgtttcaggagctctgggtcactgctcaacaatgccataaagggaggtgtagaagatgaagcgaccctctccgcctatgttactattgcccttctggaaattcctctcccagtcactaaccctattgttcgcaatgccctgttctgcctggagtcagcctggaatgtagcaaaggaggggacccatgggagccatgtctacaccaaggcattgctggcctatgctttttccctactgggaaagcaaaatcagaatagagaaatactgaactcacttgataaggaagctgtgaaagaagacaacctcgtccattgggagcgccctcagagacccaaggcaccagtggggcatctttaccaaacccaggctccctctgctgaggtggagatgacatcctatgtgctcctcgcttatctcacggcccagccagcccccacctcaggggacctgacctctgcaactaacattgtgaagtggatcatgaagcagcagaacgcccaaggtggtttctcctccacccaggacacagtggtggctctccatgccctgtccaggtatggagcagccactttcaccagaactgagaaaactgcacaggtcaccgttcaggattcacagaccttttctacaaatttccaagtagacaacaacaacctcctattactgcagcagatctcattgccagagctccctggagaatatgtcataacagtaactggggaaagatgtgtgtatcttcagacatccatgaaatacaatattcttccagagaaagaggactccccatttgctttaaaagtgcagactgtgccccaaacttgcgatggacacaaagcccacaccagctttcagatctcactgaccatcagttacacaggaaaccgtcctgcttccaatatggtgattgttgatgtaaagatggtatctggttttattcccctgaaaccaacagtaaaaatgcttgaaagatctagctctgtgagccggacagaagtgagcaacaaccatgtcctcatttatgtggaacaggtgacaaatcagacgctaagtttttccttcatggttctgcaagacatcccagtaggagacttgaagccagcaattgttaaagtctatgattactatgagacagatgagtctgtggttgctgagtatatcgccccctgcagcacagatacagagcatggaaatgtttgaggaccatacaggctgtatattttggtggattctctgtcctatacatttacttagaaggaatggagttatttgtctctataaaatagacactaaaaatatttgctgaataaatatgtacttctggtcaaactaaaaaa

SEQ ID NO: 144 - protein, 1482 aa, Homo sapiens
MRKDRLLHLCLVLLLILLSASDSNSTEPQYMVLVPSLLHTEAPKKGCVLLSHLNETVTVSASLESGRENRSLFTDLVAEKDLFHCVSFTLPRISASSEVAFLSIQIKGPTQDFRKRNTVLVLNTQSLVFVQTDKPMYKPGQTVRFRVVSVDENFRPRNELIPLIYLENPRRNRIAQWQSLKLEAGINQLSFPLSSEPIQGSYRVVVQTESGGRIQHPFTVEEFVLPKFEVKVQVPKIISIMDEKVNITVCGEYTYGKPVPGLATVSLCRKLSRVLNCDKQEVCEEFSQQLNSNGCITQQVHTKMLQITNTGFEMKLRVEARIREEGTDLEVTANRISEITNIVSKLKFVKVDSHFRQGIPFFAQVLLVDGKGVPIPNKLFFISVNDANYYSNATTNEQGLAQFSINTTSISVNKLFVRVFTVHPNLCFHYSWVAEDHQGAQHTANRVFSLSGSYIHLEPVAGTLPCGHTETITAHYTLNRQAMGELSELSFHYLIMAKGVIVRSGTHTLPVESGDMKGSFALSFPVESDVAPIARMFIFAILPDGEVVGDSEKFEIENCLANKVDLSFSPAQSPPASHAHLQVAAAPQSLCALRAVDQSVLLMKPEAELSVSSVYNLLTVKDLTNFPDNVDQQEEEQGHCPRPFFIHNGAIYVPLSSNEADIYSFLKGMGLKVFTNSKIRKPKSCSVIPSVSAGAVGQGYYGAGLGVVERPYVPQLGTYNVIPLNNEQSSGPVPETVRSYFPETWIWELVAVNSSGVAEVGVTVPDTITEWKAGAFCLSEDAGLGISSTASLRAFQPFFVELTMPYSVIRGEVFTLKATVLNYLPKCIRVSVQLKASPAFLASQNTKGEESYCICGNERQTLSWTVTPKTLGNVNFSVSAEAMQSLELCGNEVVEVPEIKRKDTVIKTLLVEAEGIEQEKTFSSMTCASGANVSEQLSLKLPSNVVKESARASFSVLGDILGSAMQNIQNLLQMPYGCGEQNMVLFAPNIYVLNYLNETQQLTQEIKAKAVGYLITGYQRQLNYKHQDGSYSTFGERYGRNQGNTWLTAFVLKTFAQARSYIFIDEAHITQSLTWLSQMQKDNGCFRSSGSLLNNAIKGGVEDEATLSAYVTIALLEIPLPVTNPIVRNALFCLESAWNVAKEGTHGSHVYTKALLAYAFSLLGKQNQNREILNSLDKEAVKEDNLVHWERPQRPKAPVGHLYQTQAPSAEVEMTSYVLLAYLTAQPAPTSGDLTSATNIVKWIMKQQNAQGGFSSTQDTVVALHALSRYGAATFTRTEKTAQVTVQDSQTFSTNFQVDNNNLLLLQQISLPELPGEYVITVTGERCVYLQTSMKYNILPEKEDSPFALKVQTVPQTCDGHKAHTSFQISLTISYTGNRPASNMVIVDVKMVSGFIPLKPTVKMLERSSSVSRTEVSNNHVLIYVEQVTNQTLSFSFMVLQDIPVGDLKPAIVKVYDYYETDESVVAEYIAPCSTDTEHGNV

SEQ ID NO: 145 - DNA, 11208 bp, Homo sapiens
ccggcccttcgcctctgggcgatgggcgacctgtgaggccggtccccatcgctgggggcgcgtgtgggaggaggcggccgcccgagtgaccgggagccgggccgcggccttccctcgcccgcctcggcccctcccactcctctgccccggggccgccaccgcccgggcgtcggacctggtcccgtgctcgcggtgccgccgccctctgggcctagcccgcccagctcggcgagcggcggcagtgggagccgcgtccgccgcatccgcctcgactcggtgccggcccctggccctcccctcatgactgcggcgcctctgctgccaccgcccgcccggccgccgctcgccgcaggatggatgcggaccgtgcggcgctaacccccgtggctcagctcccgaatcgcccgccttcgagccctcctcgtgagccgcagcagcctcggtgccagcccccgccgcagctgggcccagcggtccgcctgtccctcgttgcggcttgtcggtgctgagtgaggcgtcgtccgggtcggcgcgaacccgcccggccgcggttccctgcagacctctgcgcgggcggctcggcccttcacgcccttttcgttcacgaatccgagcccgctcgcctctctccagcgaaccgaccatgtctggcggcgccgcagagaagcagagcagcactcccggttccctgttcctctcgccgccggctcctgcccccaagaatggctccagctccgattcctccgtgggggagaaactgggagccgcggccgccgacgctgtgaccggcaggaccgaggagtacaggcgccgccgccacactatggacaaggacagccgtggggcggccgcgaccactaccaccactgagcaccgcttcttccgccggagcgtcatctgtgactccaatgccactgcactggagcttcccggccttcctctttccctgccccagcccagcatccccgcggctgtcccgcagagtgctccaccggagccccaccgggaagagaccgtgaccgccaccgccacttcccaggtagcccagcagcctccagccgctgccgcccctggggaacaggccgtcgcgggccctgccccctcgactgtccccagcagtaccagcaaagaccgcccagtgtcccagcctagccttgtggggagcaaagaggagccgccgccggcgagaagtggcagcggcggcggcagcgccaaggagccacaggaggaacggagccagcagcaggatgatatcgaagagctggagaccaaggccgtgggaatgtctaacgatggccgctttctcaagtttgacatcgaaatcggcagaggctcctttaagacggtctacaaaggtctggacactgaaaccaccgtggaagtcgcctggtgtgaactgcaggatcgaaaattaacaaagtctgagaggcagagatttaaagaagaagctgaaatgttaaaaggtcttcagcatcccaatattgttagattttatgattcctgggaatccacagtaaaaggaaagaagtgcattgttttggtgactgaacttatgacgtctggaacacttaaaacgtatctgaaaaggtttaaagtgatgaagatcaaagttctaagaagctggtgccgtcagatccttaaaggtcttcagtttcttcatactcgaactccacctatcattcaccgcgatcttaaatgtgacaacatctttatcaccggccctactggctcagtcaagattggagacctcggtctggcaaccctgaagcgggcttcttttgccaagagtgtgataggtaccccagagttcatggcccctgagatgtatgaggagaaatatgatgaatccgttgacgtttatgcttttgggatgtgcatgcttgagatggctacatctgaatatccttactcggagtgccaaaatgctgcacagatctaccgtcgcgtgaccagtggggtgaagccagccagttttgacaaagtagcaattcctgaagtgaaggaaattattgaaggatgcatacgacaaaacaaagatgaaagatattccatcaaagaccttttgaaccatgccttcttccaagaggaaacaggagtacgggtagaattagcagaagaagatgatggagaaaaaatagccataaaattatggctacgtattgaagatattaagaaattaaagggaaaatacaaagataatgaagctattgagttttcttttgatttagagagagatgtcccagaagatgttgcacaagaaatggtagagtctgggtatgtctgtgaaggtgatcacaagaccatggctaaagctatcaaagacagagtatcattaattaagaggaaacgagagcagcggcagttggtacgggaggagcaagaaaaaaaaaagcaggaagagagcagtctcaaacagcaggtagaacaatccagtgcttcccagacaggaatcaagcagctcccttctgctagcaccggcatacctactgcttctaccacttcagcttcagtttctacacaagtagaacctgaagaacctgaggcagatcaacatcaacaactacagtaccagcaacccagtatatctgtgttatctgatgggacggttgacagtggtcagggatcctctgtcttcacagaatctcgagtgagcagccaacagacagtttcatatggttcccaacatgaacaggcacattctacaggcacagtcccagggcatataccttctactgtccaagcacagtctcagccccatggggtatatccaccctcaagtgtgcctcgtcgtggccgtagcatgtcggtttgtgttcccatctttctgctgttgcctctgtgtcccgcatctctcccagtgctcttccaccccaccgccagtactgtctgcacctctttctccttccctcctccggactgccccgaggaaacttttgccgaaaagctttctaaagcattggagagtgtcctgcctatgcactctgcctctcagcgcaagcaccgacgctccagcctgccttccctctttgtcagtactcctcagtccatggcgcatccgtgtggggggaccccaacatacccagaatcacagatatttttcccaactattcatgaacgtccagtttctttttcaccacctcccacctgcccaccgaaagtagccatttcccagcggcgtaagagcacctccttcctggaagcccaaactcaccacttccaacccctgctgaggactgttggccaaagtcttcttccacctggtggcagcccaactaactggacaccagaggccgtagttatgttgggtactacagccagtagagtaactggagagtcatgtgagatacaggtccatcctatgtttgaaccatctcaagtttacagtgactatagacctggactagtacttccagaagaagctcactattttattcctcaggaagcagtgtatgtagctggggtacattaccaggcccgggtggcagaacagtatgagggcattccatacaactcatcagtactgtcaagtcctatgaaacagatacctgaacagaagccagtacaagggggccctacttcaagttctgtctttgaatttccatctggacaggctttcctggtaggacaccttcagaatctaagattagattctggattgggtccgggatctcccctctctagtatttctgcacctatcagtacagatgctacacgtttgaaatttcaccctgtctttgttcctcattctgcgcctgctgtgttaactcataacaatgagagcagaagcaactgtgtatttgaatttcatgttcacacaccaagctcctcttcaggagaaggaggtggaattttacctcagcgtgtttaccgaaatcggcaggttgcagtggacttgaatcaagaagaactgcctcctcaatcagttggattacatggctacttgcagcctgtgactgaagaaaagcataattaccatgccccagaattgaccgtttctgtggtagagcctatcggacagaactggccaataggaagcccagaatattccagtgattcctcacaaatcacttcttcagaccccagtgattttcagtcacctccccctacagggggagcagctgcaccttttggctctgacgtctcaatgccctttatccatctgcctcagacagtgttacaagaatccccacttttcttctgtttcccccaaggaaccacatctcagcaggtcttaactgcctcattttcttcaggaggatctgcacttcatccacaggcacaggggcagagccagggtcagccatcctcaagtagcttaacaggggtttcatcttcccaacccatacaacatcctcagcagcagcagggaatacagcagacagcccctcctcaacagacagtgcagtattcactttcacagacatcaacctccagtgaggccactactgcacagccagtgagtcagcctcaagctccacaagtcttgcctcaagtatcagctggaaaacagagtactcagggagtctctcaggttgctcctgcagagccagttgcagtagcacagacccaagctacccagccgaccactttggcttcctctgtagacagtgcacattcagatgttgcttcaggtatgagtgatggcaatgagaacgtcccatcttccagtggaaggcatgaaggaagaactacaaaacggcattaccgaaaatctgtaaggagtcgctctcgacatgaaaaaacttcacgcccaaaattaagaattttgaatgtttcaaataaaggagaccgagtagtagaatgtcaattagagactcataataggaaaatggttacattcaaatttgacctagatggtgacaaccccgaggagatagcaacaattatggtgaacaatgactttattctagcaatagagagagagtcgtttgtggatcaagtgcgagaaattattgaaaaagctgatgaaatgctcagtgaggatgtcagtgtggaaccagagggtgatcagggattggagagtctacaaggaaaggatgactatggcttttcaggttctcagaaattggaaggagagttcaaacaaccaattcctgcgtcttccatgccacagcaaataggcattcctaccagttctttaactcaagttgttcattctgcgggaaggcggtttatagtgagtcctgtgccagaaagccgattacgagaatcaaaagttttccccagtgaaataacagatacagttgctgcctctacagctcagagccctggaatgaacttgtctcactctgcatcatcccttagtctacaacaggccttttctgaacttagacgtgcccaaatgacagaaggacccaacacagcacctccaaactttagtcatacaggaccaacatttccagtagtacctcctttcttaagtagcattgctggagtcccaaccacagcagcagccacagcaccagtccctgcaacaagcagccctcctaatgacatttccacatcagtaattcagtctgaggttacagtgcccactgaagaggggattgctggagttgccaccagcacaggtgtggtaacttcaggtggtctccccataccacctgtgtctgaatcaccagtactttccagcgtagtttcaagtatcacaatacctgcagttgtctcaatatctactacatccccgtcacttcaagtccccacatccacatctgagatcgttgtttctagtacagcactgtatccttcagtaacagtttcagcaacttcagcctctgcagggggcagtactgctaccccaggtcctaagcctccagctgtagtatctcagcaggcagcaggcagcactactgtgggagccacattaacatcagtttctaccaccacttcattcccaagcacagcttcacagctgtgcattcagcttagcagcagtacttctactcctactttagctgaaaccgtggtagttagcgcacactcactagataagacatctcatagcagtacaactggattggctttctccctctctgcaccatcttcctcttcctctcctggagcaggagtgtctagttatatttctcagcctggtgggctgcatcctttggtcattccatcagtgatagcttctactcctattcttccccaagcagcaggacctacttctacacctttattaccccaagtacctagtatcccacccttggtacagcctgttgccaatgtgcctgctgtacagcagacactaattcatagtcagcctcaaccagctttgcttcccaaccagccccatactcattgtcctgaagtagattctgatacacaacccaaagctcctggaattgatgacataaagactctagaagaaaagctgcggtctctgttcagtgaacacagctcatctggagctcagcatgcctctgtctcactggagacctcactagtcatagagagcactgtcacaccaggcatcccaactactgctgttgcaccaagcaaactcctgacttctaccacaagtacttgcttaccaccaaccaatttaccactaggaacagttgctttgccagttacaccagtggtcacacctgggcaagtttctaccccagtcagcactactacatcaggagtgaaacctggaactgctccctccaagccacctctaactaaggctccggtgctgccagtgggtactgaacttccagcaggtactctacccagcgagcagctgccaccttttccaggaccttctctaacccagtcccagcaacctctagaggatcttgatgctcaattgagaagaacacttagtccagagatgatcacagtgacttctgcggttggtcctgtgtccatggcggctccaacagcaatcacagaagcaggaacacagcctcagaagggtgtttctcaagtcaaagaaggccctgtcctagcaactagttcaggagctggtgtttttaagatgggacgatttcaggtttctgttgcagcagacggtgcccagaaagagggtaaaaataagtcagaagatgcaaagtctgttcattttgaatccagcacctcagagtcctcagtgctatcaagtagtagtccagagagtaccttggtgaaaccagagccgaatggcataaccatccctggtatctcttcagatgtgccagagagtgcccacaaaactactgcctcagaggcaaagtcagacactgggcagcctaccaaggttggacgttttcaggtgacaactacagcaaacaaagtgggtcgtttctctgtatcaaaaactgaggacaagatcactgacacaaagaaagaaggaccagtggcatctcctccttttatggatttggaacaagctgttcttcctgctgtgataccaaagaaagagaagcctgaactgtcagagccttcacatctaaatgggccgtcttctgacccggaggccgcttttttaagtagggatgtggatgatggttccggtagtccacactcgccccatcagctgagctcaaagagccttcctagccagaatctaagtcaaagccttagtaattcatttaactcctcttacatgagtagcgacaatgagtcagatatcgaagatgaagacttaaagttagagctgcgacgactacgagataaacatctcaaagagattcaggacctgcagagtcgccagaagcatgaaattgaatctttgtataccaaactgggcaaggtgccccctgctgttattattcccccagctgctcccctttcagggagaagacgacgacccactaaaagcaaaggcagcaaatctagtcgaagcagttccttggggaataaaagcccccagctttcaggtaacctgtctggtcagagtgcagcttcagtcttgcacccccagcagaccctccaccctcctggcaacatcccagagtccgggcagaatcagctgttacagccccttaagccatctccctccagtgacaacctctattcagccttcaccagtgatggtgccatttcagtaccaagcctttctgctccaggtcaaggaaccagcagcacaaacactgttggggcaacagtgaacagccaagccgcccaagctcagcctcctgccatgacgtccagcaggaagggcacattcacagatgacttgcacaagttggtagacaattgggcccgagatgccatgaatctctcaggcaggagaggaagcaaagggcacatgaattacgagggccctggaatggcaaggaagttctctgcacctgggcaactgtgcatctccatgacctcgaacctgggtggctctgcccccatctctgcagcatcagctacctctctaggtcacttcaccaagtctatgtgccccccacagcagtatggctttccagctaccccatttggcgctcaatggagtgggacgggtggcccagcaccacagccacttggccagttccaacctgtgggaactgcctccttgcagaatttcaacatcagcaatttgcagaaatccatcagcaaccccccaggctccaacctgcggaccacttagacctagagacattaactgaatagatctgggggcaggagatggaatgctgagggggtgggtgggggtgggaagtagcctatatactaactactagtgctgcatttaactggttatttcttgccagaggggaatgtttttaatactgcattgagccctcagaatggagagtctcccccgctccagttattggaatgggagaggaaggaaagaacagcttttttgtcaaggggcagcttcagaccatgctttcctgtttatctatactcagtaatgaggatgagggctaggaaagtcttgttcataaggaagctggagaactcaatgtaaaatcaaacccatctgtaatttcgagtgggtggagctcttgcttttggtacatgccctgaatccctcactccctcaagaatccgaaccacaggacaaaaaccacctactgggctctctcctaccctgccctcctcccttttttttacccctctcttttttattttttctttgctctttagaacccagtgaaaaataccagggtactggggtgcaactctttcttatgataggtcattagtgctttaagcaaaagatattagcagctttgactgcagcattagcaattaggaaaaaaaaaaaattaagttccctgcggacatgtaactttgccatcagttttgatgtggaaacactgtgatatataaaatgttgttggacaacagtagttttaagagtaaaatatgaaacgtttaaaaagttccaaaaaaagctagctctgtcctttacttattgagacactttaactttttcctttgtatttccattgtattagataaataaatgtgaatgtaaaattgtataaattactgtacttgaatacttctgtttcccagtgttgcttgctggacattttagtgccttggacttctattgcttctgccattagcatcaacttaccagaccccagatcaataaagggcatgtggaaggaaatcgtaggtccatgtgaccccagcagtccagcagtggttatgccaaagggaaattgaaaaagtatttttttaagtcattcaacaactttgtctagagcaggtgtaagatgagtagggtgggaagttaggttggcatcagtggttaaaaacagaaagttctgtttcgggaatagtgaggagggggtgttgtaacaaaattggacaacttaaaagaatggtgtgtgctgggtgaaagacaaagactaaagaatgaggaaacaaacgtgatgcctggccagtgactgtcatataaacctttcttatttgagctaggcttgaacagacgtgacctagaagaaactgaacataaagagaagggggtggggggctagttttcaagttggggaacctgatagtgaaaagtcacagatggagaaaattgctctcagaaaaactgtttggattgctttcctcttgttgcacatgtaccatgcatttctcagcttggggtactacattttgtggaaagttaatctatctatctttccacatctgaattaatcattctaggaaagaatacttattcctactcatttcctttatgatgtccaaatggttgcaggatcataatctattgtgccacctttatttctagaagtacaactaatatgttcacattttcaaataaataatactccccgtaagtaataactgcaaccaatcagtgttattcagtgctatgcctccttgtaatgggtagttattaattattttcagagctttccggaaatactgtcctaactggctatgtttaggatctttgttatctctgaagacaaagaaagaagctaggactcttaattttggggtgcttcttgactcttagttgggaaactgaaaatatttccaaccttttacccacgtcaatggcatattctgggaatcaccaccaccaccaccactaccacagaaagaggctggaggctcctgtaccctgttcattccttaagggccctgcttcccttagtaagtaagtaagttggtctacggccctaaatatgcaaatgagagctgaaggtttttaaaaggtagaaaggaaaagggcaagggcttccacccctgctttaaaatgatttatttattctctgcttgtatttcttgtggagagagtaaggatagaaccaacaaggggctgagtagctgagaaaggggccacccaagagtgaaacatactttataccagaggagcagtggagcctcatgcagcacattatcatttgttatttgggtttaataataattttgacatcttttcactcatacacaaaaaaagtcagaactggtgttatttactgttgatttcatcctcctgtgtatgaaataacaagcctagaggaatgaactagtgctactgaactgtttaaattatttttgtgttaatagtacactttgagtatctttttccacattaaaaactttctgaattataaatgttttccttacattatttaacaatgtacactgttaaaaataaaaataaaaattcaaactttgggggtttctcagcagccgttaattgtacattttgcactaactctgggtgttgcgcttcttgtaagattgcgctttgtgcttcagtttgttacctttgtagacttatttaatgaaaccattcaaataaaccaaacttgcttttgttga

SEQ ID NO: 146 - protein, 2634 aa, Homo sapiens
MSGGAAEKQSSTPGSLFLSPPAPAPKNGSSSDSSVGEKLGAAAADAVTGRTEEYRRRRHTMDKDSRGAAATTTTTEHRFFRRSVICDSNATALELPGLPLSLPQPSIPAAVPQSAPPEPHREETVTATATSQVAQQPPAAAAPGEQAVAGPAPSTVPSSTSKDRPVSQPSLVGSKEEPPPARSGSGGGSAKEPQEERSQQQDDIEELETKAVGMSNDGRFLKFDIEIGRGSFKTVYKGLDTETTVEVAWCELQDRKLTKSERQRFKEEAEMLKGLQHPNIVRFYDSWESTVKGKKCIVLVTELMTSGTLKTYLKRFKVMKIKVLRSWCRQILKGLQFLHTRTPPIIHRDLKCDNIFITGPTGSVKIGDLGLATLKRASFAKSVIGTPEFMAPEMYEEKYDESVDVYAFGMCMLEMATSEYPYSECQNAAQIYRRVTSGVKPASFDKVAIPEVKEIIEGCIRQNKDERYSIKDLLNHAFFQEETGVRVELAEEDDGEKIAIKLWLRIEDIKKLKGKYKDNEAIEFSFDLERDVPEDVAQEMVESGYVCEGDHKTMAKAIKDRVSLIKRKREQRQLVREEQEKKKQEESSLKQQVEQSSASQTGIKQLPSASTGIPTASTTSASVSTQVEPEEPEADQHQQLQYQQPSISVLSDGTVDSGQGSSVFTESRVSSQQTVSYGSQHEQAHSTGTVPGHIPSTVQAQSQPHGVYPPSSVPRRGRSMSVCVPIFLLLPLCPASLPVLFHPTASTVCTSFSFPPPDCPEETFAEKLSKALESVLPMHSASQRKHRRSSLPSLFVSTPQSMAHPCGGTPTYPESQIFFPTIHERPVSFSPPPTCPPKVAISQRRKSTSFLEAQTHHFQPLLRTVGQSLLPPGGSPTNWTPEAVVMLGTTASRVTGESCEIQVHPMFEPSQVYSDYRPGLVLPEEAHYFIPQEAVYVAGVHYQARVAEQYEGIPYNSSVLSSPMKQIPEQKPVQGGPTSSSVFEFPSGQAFLVGHLQNLRLDSGLGPGSPLSSISAPISTDATRLKFHPVFVPHSAPAVLTHNNESRSNCVFEFHVHTPSSSSGEGGGILPQRVYRNRQVAVDLNQEELPPQSVGLHGYLQPVTEEKHNYHAPELTVSVVEPIGQNWPIGSPEYSSDSSQITSSDPSDFQSPPPTGGAAAPFGSDVSMPFIHLPQTVLQESPLFFCFPQGTTSQQVLTASFSSGGSALHPQAQGQSQGQPSSSSLTGVSSSQPIQHPQQQQGIQQTAPPQQTVQYSLSQTSTSSEATTAQPVSQPQAPQVLPQVSAGKQSTQGVSQVAPAEPVAVAQTQATQPTTLASSVDSAHSDVASGMSDGNENVPSSSGRHEGRTTKRHYRKSVRSRSRHEKTSRPKLRILNVSNKGDRVVECQLETHNRKMVTFKFDLDGDNPEEIATIMVNNDFILAIERESFVDQVREIIEKADEMLSEDVSVEPEGDQGLESLQGKDDYGFSGSQKLEGEFKQPIPASSMPQQIGIPTSSLTQVVHSAGRRFIVSPVPESRLRESKVFPSEITDTVAASTAQSPGMNLSHSASSLSLQQAFSELRRAQMTEGPNTAPPNFSHTGPTFPVVPPFLSSIAGVPTTAAATAPVPATSSPPNDISTSVIQSEVTVPTEEGIAGVATSTGVVTSGGLPIPPVSESPVLSSVVSSITIPAVVSISTTSPSLQVPTSTSEIVVSSTALYPSVTVSATSASAGGSTATPGPKPPAVVSQQAAGSTTVGATLTSVSTTTSFPSTASQLCIQLSSSTSTPTLAETVVVSAHSLDKTSHSSTTGLAFSLSAPSSSSSPGAGVSSYISQPGGLHPLVIPSVIASTPILPQAAGPTSTPLLPQVPSIPPLVQPVANVPAVQQTLIHSQPQPALLPNQPHTHCPEVDSDTQPKAPGIDDIKTLEEKLRSLFSEHSSSGAQHASVSLETSLVIESTVTPGIPTTAVAPSKLLTSTTSTCLPPTNLPLGTVALPVTPVVTPGQVSTPVSTTTSGVKPGTAPSKPPLTKAPVLPVGTELPAGTLPSEQLPPFPGPSLTQSQQPLEDLDAQLRRTLSPEMITVTSAVGPVSMAAPTAITEAGTQPQKGVSQVKEGPVLATSSGAGVFKMGRFQVSVAADGAQKEGKNKSEDAKSVHFESSTSESSVLSSSSPESTLVKPEPNGITIPGISSDVPESAHKTTASEAKSDTGQPTKVGRFQVTTTANKVGRFSVSKTEDKITDTKKEGPVASPPFMDLEQAVLPAVIPKKEKPELSEPSHLNGPSSDPEAAFLSRDVDDGSGSPHSPHQLSSKSLPSQNLSQSLSNSFNSSYMSSDNESDIEDEDLKLELRRLRDKHLKEIQDLQSRQKHEIESLYTKLGKVPPAVIIPPAAPLSGRRRRPTKSKGSKSSRSSSLGNKSPQLSGNLSGQSAASVLHPQQTLHPPGNIPESGQNQLLQPLKPSPSSDNLYSAFTSDGAISVPSLSAPGQGTSSTNTVGATVNSQAAQAQPPAMTSSRKGTFTDDLHKLVDNWARDAMNLSGRRGSKGHMNYEGPGMARKFSAPGQLCISMTSNLGGSAPISAASATSLGHFTKSMCPPQQYGFPATPFGAQWSGTGGPAPQPLGQFQPVGTASLQNFNISNLQKSISNPPGSNLRTT

SEQ ID NO: 147 - DNA, 1445 bp, Homo sapiens
ccagtgaataatcagaagtcagtttgggagaagtcaaaatggacacaatcttcttgtggagtcttctattgctgttttttggaagtcaagcctcaagatgctcagctcaaaaaaataccgaatttgcagtggatctttatcaagaggtttccttatctcataaggacaacattatattttcaccccttggaataactttggttcttgagatggtacaactgggagccaaaggaaaagcacagcagcagataagacaaactttaaaacaacaggaaacctcagctggggaagaattttttgtactgaagtcatttttctctgccatctcagagaaaaaacaagaatttacatttaatcttgccaatgccctctaccttcaagaaggattcactgtgaaagaacagtatctccatggcaacaaggaattttttcagagtgctataaaactggtggattttcaagatgcaaaggcttgtgcagagatgataagtacctgggtagaaagaaaaacagatggaaaaattaaagacatgttttcaggggaagaatttggccctctgactcggcttgtcctggtgaatgctatttatttcaaaggagattggaaacagaaattcagaaaagaggacacacagctgataaattttactaagaaaaatggttcaactgtcaaaattccaatgatgaaggctcttctgagaacaaaatatggttatttttctgaatcttccctgaactaccaagttttagaattgtcttacaaaggtgatgaatttagcttaattatcatacttcctgcagaaggtatggatatagaagaagtggaaaaactaattactgctcaacaaatcctaaaatggctctctgagatgcaagaagaggaagtagaaataagcctccctagatttaaagtagaacaaaaagtagacttcaaagacgttttgtattctttgaacataaccgagatatttagtggtggctgcgacctttctggaataacagattcatctgaagtgtatgtttcccaagtgacgcaaaaagttttctttgagataaatgaagatggtagtgaagctgcaacatcaactggcatacacatccctgtgatcatgagtctggctcaaagccaatttatagcaaatcatccatttctgtttattatgaagcataatccaacagaatcaattctgtttatgggaagagtgacaaatcctgacacccaggagataaaaggaagagatttagattcactgtgaatgaaaagcacagcctcagaataaaagatgatttctcaaaaatagctgattggcaaaatatcgtcatcttgacaatatttgctctatatcttatgtcttttctgttttaaactgtgcctgtagtaatagatatctgtcttgatgaataagtaaaattaggtatgcatttgtttcaaaaaaaaaaaaaaa

SEQ ID NO: 148 - protein, 405 aa, Homo sapiens
MDTIFLWSLLLLFFGSQASRCSAQKNTEFAVDLYQEVSLSHKDNIIFSPLGITLVLEMVQLGAKGKAQQQIRQTLKQQETSAGEEFFVLKSFFSAISEKKQEFTFNLANALYLQEGFTVKEQYLHGNKEFFQSAIKLVDFQDAKACAEMISTWVERKTDGKIKDMFSGEEFGPLTRLVLVNAIYFKGDWKQKFRKEDTQLINFTKKNGSTVKIPMMKALLRTKYGYFSESSLNYQVLELSYKGDEFSLIIILPAEGMDIEEVEKLITAQQILKWLSEMQEEEVEISLPRFKVEQKVDFKDVLYSLNITEIFSGGCDLSGITDSSEVYVSQVTQKVFFEINEDGSEAATSTGIHIPVIMSLAQSQFIANHPFLFIMKHNPTESILFMGRVTNPDTQEIKGRDLDSL

SEQ ID NO: 149 - DNA, 3163 bp, Homo sapiens
atgacaccaagcaaagcctacttagtttagatctccagaaattggctggtggaaaaaaatcaaacatgaagattgcagttttgttttgtttttttctgcttatcatttttcaaactgactttggaaaaaatgaagaaattcctaggaagcaaaggaggaagatctaccacagaaggttgaggaaaagttcaacctcacacaagcacagatcaaacagacagcttggaattcagcaaacaacagtttttacaccagtagcaagacttcctattgttaactttgattatagcatggaggaaaagtttgaatccttttcaagttttcctggagtagaatcaagttataatgtgttaccaggaaagaagggacactgtttggtaaagggcataaccatgtacaacaaagctgtgtggtcgcctgagccctgcactacctgcctctgctcagatggaagagttctttgtgatgaaaccatgtgccatccccagaggtgcccccaaacagttatacctgaaggggaatgctgcccggtctgctccgctactgtctcctattctctactcagtggtatagcattaaatgatagaaatgaattttctggtgattcttcagaacaaagagaacctaccaatttacttcataagcaactgccacctcctcaggtgggaatggaccgaatagtaagaaaagaagcacttcaatctgaggaggatgaagaagtgaaagaagaagatacagagcaaaagagagagacccctgaatctagaaatcaggggcaactttacagtgagggggacagcagaggaggagacagaaagcagaggcctggagaggagaggaggctggcacaccagcaacaacgccaaggaagggaggaggaggaggatgaggaggaggagggtgaggagggtgaggaggatgaggaggacgaggaggacccggtaagaggagatatgttccgaatgccctctcgatccccgcttcctgctcctcccagaggcacactgcgcctgccaagcgggtgctctctgtcctacaggaccatcagctgcatcaacgccatgcttacccagataccaccgctgacagcaccacagataacaagtctggagctcactggcaattccatcgcctccatcccagatgaagcatttaatggattaccaaatttggaaaggcttgatctgagtaaaaataatatcacttcttcaggcataggtccaaaagcattcaagcttctgaagaagttaatgcgtttgaatatggatggaaataatttgatacagattccttcacaattgccatctacattagaagaacttaaagtcaatgagaacaatcttcaggctatcgatgaagaaagtttatcagacttaaatcagttggtcaccttagaattggaaggaaacaatctcagtgaagccaatgtcaatcctttagctttcaaacctttgaagagcctagcctacttgcgtctgggaaaaaataaatttagaattataccgcagggtcttcctggttctattgaggaattatacctagaaaataaccaaattgaagaaataactgaaatttgtttcaatcataccagaaagatcaatgtcattgtactacgttataacaaaattgaagaaaataggattgctcctttagcctggataaatcaagaaaatctagaatccattgatctctcctacaacaagctctatcacgtcccgtcctatctacccaagtccttgctgcacctagtactccttgggaaccagattgaacggatccctggctatgtgtttggccacatggaaccaggcctggaatacttgtacctgtcatttaacaaacttgctgatgatggcatggaccgtgtctccttctatggggcatatcattctctgagagaattatttctggatcacaatgacttaaaatctataccacctgggatacaagaaatgaaagcactacattttctgaggctgaacaacaacaagatacggaacattcttccagaagaaatttgcaatgctgaagaggatgatgactcaaatctggaacatcttcatcttgaaaacaattatattaaaattagagaaataccatcttacacattttcatgcataagatcatactcaagtatcgttcttaaaccacaaaacatcaagtaattccaagttttcctttgctgtttataaactttactcatgtatttgtagtagctgcatttgtcattaataagagagacataatcctcctgttatactcagtatcattatatgctagtcaacctgattcactaacacacagatgaacaaccaaaatatacctaaaaggtatagtctctaggagttttattaatagtaaaggtaaaatctctcagtttcctacctctagaaagaggccatctcactagaataggatattatgcatactgagctagaccagaagagtctggaacaaaataaacacagcctttataatcaacttgaatactggtgttagctgagaactctgtaagtccctttaaaaattatgtatcttttggttcaagattaagaagcataatgacaacaaaaaaagcaggcagaatttatgaataagtgttgtttattattaaaacaataatttgttaatttcttataaggtcctgtgctataattactggtataaatataactgaatattggggtagctttcatttcttccattaattacatgtgtaaaattaaaacactactgtaatgttaatttcctggttttgaaaatcatattatggttatgtacattgttaacattaaggaaagctggcagaagggtgtgcataaattctatactctttttgaaacttttctataattctaaaattattttttaaagttaaacagtatattaagattaccttcactattcctcactcaagattaagacattttttgaaaagcagtagagtttgcttaaaatacaaattaattattcttgactataaccttgtaaaggtaaatctaatgtataaatttttgaaaaattttgcaccactggtcatagcatctatctcctttgccttaatttactgaaatacatcattttattcggttcaattgaaataaagctatgtctttactatgtattggccctaccaaaatcatatattaaaattttctaacat

SEQ ID NO: 150 - protein, 699 aa, Homo sapiens
MKIAVLFCFFLLIIFQTDFGKNEEIPRKQRRKIYHRRLRKSSTSHKHRSNRQLGIQQTTVFTPVARLPIVNFDYSMEEKFESFSSFPGVESSYNVLPGKKGHCLVKGITMYNKAVWSPEPCTTCLCSDGRVLCDETMCHPQRCPQTVIPEGECCPVCSATVSYSLLSGIALNDRNEFSGDSSEQREPTNLLHKQLPPPQVGMDRIVRKEALQSEEDEEVKEEDTEQKRETPESRNQGQLYSEGDSRGGDRKQRPGEERRLAHQQQRQGREEEEDEEEEGEEGEEDEEDEEDPVRGDMFRMPSRSPLPAPPRGTLRLPSGCSLSYRTISCINAMLTQIPPLTAPQITSLELTGNSIASIPDEAFNGLPNLERLDLSKNNITSSGIGPKAFKLLKKLMRLNMDGNNLIQIPSQLPSTLEELKVNENNLQAIDEESLSDLNQLVTLELEGNNLSEANVNPLAFKPLKSLAYLRLGKNKFRIIPQGLPGSIEELYLENNQIEEITEICFNHTRKINVIVLRYNKIEENRIAPLAWINQENLESIDLSYNKLYHVPSYLPKSLLHLVLLGNQIERIPGYVFGHMEPGLEYLYLSFNKLADDGMDRVSFYGAYHSLRELFLDHNDLKSIPPGIQEMKALHFLRLNNNKIRNILPEEICNAEEDDDSNLEHLHLENNYIKIREIPSYTFSCIRSYSSIVLKPQNIK

SEQ ID NO: 151 - DNA, 3450 bp, Homo sapiens
gatgcgtcactgatcggtgaggcgcggccgaggggtcggctttcctcgcgagcctgcggctgggcttcttctcagttagtgccttccacccgggagcgacccttgggagagggagtttcaggaagctcaccgagcaggggcggcccactggcctccgggggcggaggagttggcaaggggtcagcgggctcagccagaagggaagaatgaggggacaggggtactggactccccggctcagcctgcgagagagcgccaagtttccggagggagagggtagaaactggagggggtggacctgtcactcacgggactgagggtccttttctcccgctcccaggaggaacgagaatgaatatgactcaagcccgggttctggtggctgcagtggtggggttggtggctgtcctgctctacgcctccatccacaagattgaggagggccatctggctgtgtactacaggggaggagctttactaactagccccagtggaccaggctatcatatcatgttgcctttcattactacgttcagatctgtgcagacaacactacaaactgatgaagttaaaaatgtgccttgtggaacaagtggtggggtcatgatctatattgaccgaatagaagtggttaatatgttggctccttatgcagtgtttgatatcgtgaggaactatactgcagattatgacaagaccttaatcttcaataaaatccaccatgagctgaaccagttctgcagtgcccacacacttcaggaagtttacattgaattgtttgatcaaatagatgaaaacctgaagcaagctctgcagaaagacttaaacctcatggccccaggtctcactatacaggctgtgcgtgttacaaaacccaaaatcccagaagccataagaagaaattttgagttaatggaggctgagaagacaaaactccttatagctgcacagaaacaaaaggttgtggaaaaagaagctgagacagagaggaaaaaggcagttatagaagcagagaagattgcacaagtggcaaaaattcggtttcagcagaaagtgatggaaaaagaaactgaaaagcgcatttctgaaatcgaagatgctgcattcctggcccgagagaaagcgaaagcagatgctgaatattatgctgcacacaaatatgccacctcaaacaagcacaagttgaccccggaatatctggagctcaaaaagtaccaggccattgcttctaacagtaagatctattttggcagcaacatccctaacatgttcgtggactcctcatgtgctttgaaatattcagatattaggactggaagagaaagctcactcccctctaaggaggctcttgaaccctctggagagaacgtcatccaaaacaaagagagcacaggttgatgcaagaggtggaaatgttctccatatcaagatgtggcccaaggggttaagtgggaacaatcattatacggactcttcagatttacagagaacttacacttcatctgttccacctctcctgcgatagtcctgggtgctccactgattggaggatagagccagctgtctgacacacaaatggtcttttcagccacagtcttatcaagtatcctatatgtattcctttctaaactgctactcatgaatgaggaaagtctgatgctaagatactgcctgcactggaatgttaaacactaaatatataacaagctgtgttttcctaagctgagatctgttgaataatgtttacattcgtcccccggggaaatgtatgctcagccaccattcaagagatgactgagaaggagatggtaagttcaagaagactgattgcacctgggacccaggccctttctttgggatccagtcccagccttcatccatgtgattaagatccaggccgctgaagttccccaggaaatgatcttccacttgagcaaccttttacttgatacgatttgcacctttctgttttcctgcagtcagggtggtggcctgcagggacctgagctttgctacccaaccagattcctcatagagattcctaatcactagtttcttgtattcataaactcagagatacagagggcttggtttgaagttggggtgagatgaaacctttgctctgagccaaagctctggggccttgcattccctgcattgggttgatgactgtcagcatcactgccgcaggccatgcttgactaaggtacctggttttagccacagccacctccttgtatgttacctttcagctctggccaagagtgggacagggttttaaccacaaataggagcagcatgcaattcctagtgacttgctgcacagtattgtatcataattacaggaagtttttatttttaaaactggatctggggtatattcatttgccccatcacctctgtctaaaggcccaagtcctagggctgccatggtcacaagcacactgatgctccttaagattgtttatctggagcccacatagtgtggaacaaaaagtcacctagaaagcatccttggtcatcattgtctccttcccacctggcccagagatgcttaaatccaagttgtttctccagctgtcacctcccccaggagatcaggattccactgacgtcctgggcagccagtgaatttaattttccatgagaaacaacagagttaacctgtggcattaggagacctacttcatgtggaccctttttttccttcagtttaacttttctggagcagtgtgctgcgtagttcggcctgagtttgtgcagcttgttaagacaactcttgtgtacgctatgttgaagctcaacaaaaaagtcatgggaccacttctagaaatctttcagctgtcaggcctgtcagtctcatgacagtttgttggttgtgccaaacactttatttgggaaaggaaagcccagatttgaatgggtctttcccctgggccttatcctatagaggcatttgtaatatggagaaaataatttttcatttttgctcatttaattctataaattctctttataaatgaattttgtgttctttagttctccttaaaagaacttttgaattataaaaataaaatctttacctgtcgaattgttgctgcagatgattgttgtggaaaatctggatcattgacctctgtgctttcattcctagagatgttttatagttacatgagcaaaagctgttgccccaaagtgatggccctggaggcggggctgaggaacagggaaatgccgctgtgaagtcttaaagcacttctgcttaaactcccatgtgtgaggagtgtgcctccctgtgccctctcagctctgaggctggccgtctttcggggtgttccttttggcaaatatacactgtaatcttgagtctaaatttatatgttgaaatgctaccttttttaaaataagaaactaaataaaattattttactatcagtgaaaaaaaaaaaa

SEQ ID NO: 152 - protein, 348 aa, Homo sapiens
MNMTQARVLVAAVVGLVAVLLYASIHKIEEGHLAVYYRGGALLTSPSGPGYHIMLPFITTFRSVQTTLQTDEVKNVPCGTSGGVMIYIDRIEVVNMLAPYAVFDIVRNYTADYDKTLIFNKIHHELNQFCSAHTLQEVYIELFDQIDENLKQALQKDLNLMAPGLTIQAVRVTKPKIPEAIRRNFELMEAEKTKLLIAAQKQKVVEKEAETERKKAVIEAEKIAQVAKIRFQQKVMEKETEKRISEIEDAAFLAREKAKADAEYYAAHKYATSNKHKLTPEYLELKKYQAIASNSKIYFGSNIPNMFVDSSCALKYSDIRTGRESSLPSKEALEPSGENVIQNKESTG

SEQ ID NO: 153 - DNA, 10540 bp, Homo sapiens
aggagccggaggaggagccgccgccgccgttgacccggccgccggccgggagctgggagagatgcggagcccggccaccggcgtccccctcccaacgccgccgccgccgctgctgctgctgttgctgctgctgctgccgccgccactattgggagaccaagtggggccctgtcgttccttggggtccaggggacgaggctcttcgggggcctgcgcccccatgggctggctctgtccatcctcagcgtcgaacctctggctctacaccagccgctgcagggatgcgggcactgagctgactggccacctggtaccccaccacgatggcctgagggtttggtgtccagaatccgaggcccatattcccctaccaccagctcctgaaggctgcccctggagctgtcgcctcctgggcattggaggccacctttccccacagggcaagctcacactgcccgaggagcacccgtgcttaaaggctccacggctcagatgccagtcctgcaagctggcacaggcccccgggctcagggcaggggaaaggtcaccagaagagtccctgggtgggcgtcggaaaaggaatgtaaatacagccccccagttccagccccccagctaccaggccacagtgccggagaaccagccagcaggcacccctgttgcatccctgagggccatcgacccggacgagggtgaggcaggtcgactggagtacaccatggatgccctctttgatagccgctccaaccagttcttctccctggacccagtcactggtgcagtaaccacagccgaggagctggatcgtgagaccaagagcacccacgtcttcagggtcacggcgcaggaccacggcatgccccgacgaagtgccctggctacactcaccatcttggttactgacaccaatgaccatgaccctgtgttcgagcagcaggagtacaaggagagcctcagggagaacctggaggttggctatgaggtgctcactgtcagggccacggatggtgatgcccctcccaatgccaatattctgtaccgcctgctggaggggtctgggggcagcccctctgaagtctttgagatcgaccctcgctctggggtgatccgaacccgtggccctgtggatcgggaagaggtggaatcctaccagctgacggtagaggcaagtgaccagggtcgggacccgggtcctcggagtaccacagccgctgttttcctttctgtggaggatgacaatgataatgccccccagtttagtgagaagcgctatgtggtccaggtgagggaggatgtgactccaggggccccagtactccgagtcacagcctcggatcgagacaaggggagcaatgccgtggtgcactatagcatcatgagtggcaatgctcggggacagttttatctggatgcccagactggagctctggatgtggtgagccctcttgactatgagacgaccaaggagtacaccctacgggtgcgagcacaggatggtggccgtcccccactctctaatgtctctggcttggtgacagtacaggtcctggatatcaacgacaatgcccccatcttcgtcagcacccctttccaggctactgtcctggagagtgtccccttaggctacctggttctccatgtccaggctatcgacgctgatgctggtgacaatgcccgcctggaataccgccttgctggggtgggacatgacttccccttcaccatcaacaatggcacaggctggatctctgtggctgctgaactggaccgggaggaagttgatttctacagctttggggtagaagctcgagaccatggcactccagcactcactgcctcggccagtgtcagcgtgactgtcctggatgtcaacgacaacaatccaacctttacccaaccagagtacacagtgcggctcaatgaggatgcagctgtgggcaccagcgtggtgacggtgtcagctgtggaccgtgatgctcatagtgtcatcacctaccagatcaccagtggcaatactcgaaaccgcttctccatcaccagccaaagtggtggtgggctggtatcccttgccctgccactggactacaaacttgagcggcagtatgtgttggctgttaccgcctccgatggcactcggcaggacacggcacagattgtggtgaatgtcaccgacgccaacacccatcgtcctgtctttcagagctcccactatacagtgaatgttaatgaggaccggccggcaggcaccacggtggtgctgatcagcgccacggatgaggacacaggtgagaatgcccgcatcacctacttcatggaggacagcatcccccagttccgcatcgatgcagacacgggggctgtcaccacccaggctgagctggactatgaagaccaagtgtcttacaccctggccattactgctcgggacaatggcattccccagaagtccgacaccacctacctggagatcctggtgaacgacgtgaatgacaatgcccctcagttcctgcgagactcctaccagggcagtgtctatgaggatgtgccacccttcactagcgtcctgcagatctcagccactgatcgtgattctggacttaatggcagggtcttctacaccttccaaggaggcgacgatggagacggtgactttattgttgagtccacgtcaggcatcgtgcgaacgctacggaggctggatcgagagaacgtggcccagtatgtcttgcgggcatatgcagtggacaaggggatgcccccagcccgcacacctatggaagtgacagtcactgtgttggatgtgaatgacaatccccctgtctttgagcaggatgagtttgatgtgtttgtggaagagaacagccccattgggctagccgtggcccgggtcacagccactgaccccgatgaaggcaccaatgcccagattatgtaccagattgtggagggcaacatccctgaggtctttcagctggacatcttctccggggagctgacagccctggtagacttagactacgaggaccggcctgagtacgtcctggtcatccaggccacgtcagctcctctggtgagccgggctacagtccacgtccgcctccttgaccgcaatgacaacccaccagtgctgggcaactttgagatccttttcaacaactatgtcaccaatcgctcaagcagcttccctgggggtgccattggccgagtacctgcccatgaccctgatatctcagatagtctgacttacagctttgagcggggaaatgaactcagcctggtcctgctcaatgcctccacgggtgagctgaagctaagccgcgcactggacaacaaccggcctctggaggccatcatgagcgtgctggtgtcagacggcgtacacagcgtgaccgcccagtgcgcgctgcgtgtgaccatcatcaccgatgagatgctcacccacagcatcacgctgcgcctggaggacatgtcacccgagcgcttcctgtcaccactgctaggcctcttcatccaggcggtggccgccacgctggccacgccaccggaccacgtggtggtcttcaacgtacagcgggacaccgacgcccccgggggccacatcctcaacgtgagcctgtcggtgggccagccgccagggcccgggggcgggccgcccttcctgccctctgaggacctgcaggagcgcctatacctcaaccgcagcctgctgacggccatctcggcacagcgcgtgctgcccttcgacgacaacatctgcctgcgggagccctgcgagaactacatgcgctgcgtgtcggtgctgcgcttcgactcctccgcgcccttcatcgcctcctcctccgtgctcttccggcccatccaccccgtcggagggctgcgctgccgctgcccgcccggcttcacgggtgactactgcgagaccgaggtggacctctgctactcgcggccctgtggcccccacgggcgctgccgcagccgcgagggcggctacacctgcctctgtcgtgatggctacacgggtgagcactgtgaggtgagtgctcgctcaggccgttgcaccccgggtgtctgcaagaatgggggcacctgtgtcaacctgctggtgggcggtttcaagtgcgattgcccatctggagacttcgagaagccctactgccaggtgaccacgcgcagcttccccgcccactccttcatcacctttcgcggcctgcgccagcgtttccacttcaccctggccctctcgtttgccacaaaggagcgcgacgggttgctgttgtacaatgggcgtttcaatgagaagcatgactttgtggccctcgaggtgatccaggagcaggtccagctcaccttctctgcaggggagtcaaccaccacggtgtccccattcgtgcccggaggagtcagtgatggccagtggcatacggtgcagctgaaatactacaataagccactgttgggtcagacagggctcccacagggcccatcagagcagaaggtggctgtggtgaccgtggatggctgtgacacaggagtggccttgcgcttcggatctgtcctgggcaactactcctgtgctgcccagggcacccagggtggcagcaagaagtctctggatctgacggggcccctgctactaggcggggtgcctgacctgcccgagagcttcccagtccgaatgcggcagttcgtgggctgcatgcggaacctgcaggtggacagccggcacatagacatggctgacttcattgccaacaatggcaccgtgcctggctgccctgccaagaagaacgtgtgtgacagcaacacttgccacaatgggggcacttgcgtgaaccagtgggacgcgttcagctgcgagtgccccctgggctttgggggcaagagctgcgcccaggaaatggccaatccacagcacttcctgggcagcagcctggtggcctggcatggcctctcgctgcccatctcccaaccctggtacctcagcctcatgttccgcacgcgccaggccgacggtgtcctgctgcaggccatcaccagggggcgcagcaccatcaccctacagctacgagagggccacgtgatgctgagcgtggagggcacagggcttcaggcctcctctctccgtctggagccaggccgggccaatgacggtgactggcaccatgcacagctggcactgggagccagcggggggcccggccatgccattctgtccttcgattatgggcagcagagagcagagggcaacctgggcccccggctgcatggtctgcacctgagcaacataacagtgggcggaatacctgggccagccggcggtgtggcccgtggctttcggggctgtttgcagggtgtgcgggtgagcgatacgccggagggggttaacagcctggatcccagccatggggagagcatcaacgtggagcaaggctgtagcctgcctgacccttgtgactcaaacccgtgtcctgctaacagctattgcagcaacgactgggacagctattcctgcagctgtgatccaggttactatggtgacaactgtactaatgtgtgtgacctgaacccgtgtgagcaccagtctgtgtgtacccgcaagcccagtgccccccatggctatacctgcgagtgtcccccaaattaccttgggccatactgtgagaccaggattgaccagccttgtccccgtggctggtggggacatcccacatgtggcccatgcaactgtgatgtcagcaaaggctttgacccagactgcaacaagacaagcggcgagtgccactgcaaggagaaccactaccggcccccaggcagccccacctgcctcttgtgtgactgctaccccacaggctccttgtccagagtctgtgaccctgaggatggccagtgtccatgcaagccaggtgtcatcgggcgtcagtgtgaccgctgtgacaacccttttgctgaggtcaccaccaatggctgtgaagtgaattatgacagctgcccacgagcgattgaggctgggatctggtggccccgtacccgcttcgggctgcctgctgctgctccctgtcccaaaggctcctttgggactgctgtgcgccactgtgatgagcacagggggtggctccccccaaacctcttcaactgcacgtccatcaccttctcagaactgaagggcttcgctgagcggctacagcggaatgagtcaggcctagactcagggcgctcccagcagctagccctgctcctgcgcaacgccacgcagcacacagctggctacttcggcagcgacgtcaaggtggcctaccagctggccacgcggctgctggcccacgagagcacccagcggggctttgggctgtctgccacacaggacgtgcacttcactgagaatctgctgcgggtgggcagcgccctcctggacacagccaacaagcggcactgggagctgatccagcagacagagggtggcaccgcctggctgctccagcactatgaggcctacgccagtgccctggcccagaacatgcggcacacctacctaagccccttcaccatcgtcacgcccaacattgtcatctccgtagtgcgcttggacaaagggaactttgctggggccaagctgccccgctacgaggccctgcgtggggagcagcccccggaccttgagacaacagtcattctgcctgagtctgtcttcagagagacgccccccgtggtcaggcccgcaggccccggagaggcccaggagccagaggagctggcacggcgacagcgacggcacccggagctgagccagggtgaggctgtggccagcgtcatcatctaccgcaccctggccgggctactgcctcataactatgaccctgacaagcgcagcttgagagtccccaaacgcccgatcatcaacacacccgtggtgagcatcagcgtccatgatgatgaggagcttctgccccgggccctggacaaacccgtcacggtgcagttccgcctgctggagacagaggagcggaccaagcccatctgtgtcttctggaaccattcaatcctggtcagtggcacaggtggctggtcggccagaggctgtgaagtcgtcttccgcaatgagagccacgtcagctgccagtgcaaccacatgacgagcttcgctgtgctcatggacgtttctcggcgggagaatggggagatcctgccactgaagacactgacatacgtggctctaggtgtcaccttggctgcccttctgctcaccttcttcttcctcactctcttgcgtatcctgcgctccaaccaacacggcatccgacgtaacctgacagctgccctgggcctggctcagctggtcttcctcctgggaatcaaccaggctgacctcccttttgcctgcacagtcattgccatcctgctgcacttcctgtacctctgcaccttttcctgggctctgctggaggccttgcacctgtaccgggcactcactgaggtgcgcgatgtcaacaccggccccatgcgcttctactacatgctgggctggggcgtgcctgccttcatcacagggctagccgtgggcctggaccccgagggctacgggaaccctgacttctgctggctctccatctatgacacgctcatctggagttttgctggcccggtggcctttgccgtctcgatgagtgtcttcctgtacatcctggcggcccgggcctcctgtgctgcccagcggcagggctttgagaagaaaggtcctgtctcgggcctgcagccctccttcgccgtcctcctgctgctgagcgccacgtggctgctggcactgctctctgtcaacagcgacaccctcctcttccactacctctttgctacctgcaattgcatccagggccccttcatcttcctctcctatgtggtgcttagcaaggaggtccggaaagcactcaagcttgcctgcagccgcaagcccagccctgaccctgctctgaccaccaagtccaccctgacctcgtcctacaactgccccagcccctacgcagatgggcggctgtaccagccctacggagactcggccggctctctgcacagcaccagtcgctcgggcaagagtcagcccagctacatccccttcttgctgagggaggagtccgcactgaaccctggccaagggccccctggcctgggggatccaggcagcctgttcctggaaggtcaagaccagcagcatgatcctgacacggactccgacagtgacctgtccttagaagacgaccagagtggctcctatgcctctacccactcatcagacagtgaggaggaagaagaggaggaggaagaggaggccgccttccctggagagcagggctgggatagcctgctggggcctggagcagagagactgcccctgcacagtactcccaaggatgggggcccagggcctggcaaggccccctggccaggagactttgggaccacagcaaaagagagtagtggcaacggggcccctgaggagcggctgcgggagaatggagatgccctgtctcgagaggggtccctaggcccccttccaggctcttctgcccagcctcacaaaggcatccttaagaagaagtgtctgcccaccatcagcgagaagagcagcctcctgcggctccccctggagcaatgcacagggtcttcccggggctcctccgctagtgagggcagccggggaggcccccctccccgcccaccgccccggcagagcctccaggagcagctgaacggggtcatgcccatcgccatgagcatcaaggcaggcacggtggatgaggactcgtcaggctccgaatttctcttctttaacttcctgcattaaccctgggccgtggttcctacgcccgaggctcccttcccttccccagccgcactcatgccctgctcctgtcttgtgctttatcctgccccgctccccatcgcctgcccgcagcagcgacgaaacgtccatctgaggagcctgggccttgccgggaggggtactcaccccacctaaggccatctagtgccaactccccccccaccattcccctcactgcactttggacccctggggccaacatctccaagacaaagtttttcagaaaagaggaaaaaaagaatttaaaaaaggatctccactcttcatgacttcagggattcattttttttatacgctggaaattgactcccctttcccttcccaaagaggataggacctcccaggatgcttcccagcctctcctcagtttcccatctgctgtgcctctgggaggagagggactcctggggggcctgcccctcatacgccatcaccaaaaggaaaggacaaagccacacgcagccagggcttcacacccttcaggctgcacccgggcaggcctcagaacggtgaggggccagggcaaagggtgtgcctcgtcctgcccgcactgcctctcccaggaactggaaaagccctgtccggtgagggggcagaaggactcagcgcccctggacccccaaatgctgcatgaacacattttcaggggagcctgtgcccccaggcgggggtcgggcagccccagcccctctccttttcctggactctggccgtgcgcggcagcccaggtgtttgctcagttgctgacccaaaagtgcttcatttttcgtgcccgccccgcgccccgggcaggccagtcatgtgttaagttgcgcttctttgctgtgatgtgggtgggggaggaagagtaaacacagtgctggctcggctgccctgagggtgctcaatcaagcacaggtttcaagtctgggttctggtgtccactcacccaccccaccccccaaaatcagacaaatgctactttgtctaacctgctgtggcctctgagacatgttctatttttaaccccttcttggaattggctctcttcttcaaaggaccaggtcctgttcctctttctccccgactccaccccagctccctgtgaagagagagttaatatatttgttttatttatttgctttttgtgttgggatgggttcgtgtccagtcccgggggtctgatatggccatcacaggctgggtgttcccagcagccctggcttgggggcttgacgcccttccccttgccccaggccatcatctccccacctctcctcccctctcctcagttttgccgactgcttttcatctgagtcaccatttactccaagcatgtattccagacttgtcactgactttccttctggagcaggtggctagaaaaagaggctgtgggcaggaaagaaaggctcctgtttctcatttgtgaggccagcctctggcttttctgccgtggattctcccccgtcttctcccctcagcaattcctgcaaagggttaaaaatttaactggtttttactactgatgacttgatttaaaaaaaatacaaagatgctggatgctaacttggtactaaccatcagattgtacagtttggttgttgctgtaaatagggtagcgttttgttgttgttgttttttcatgccccatactactgaataaactagttctgtgcgggtacagca

SEQ ID NO: 154 - protein, 2923 aa, Homo sapiens
MRSPATGVPLPTPPPPLLLLLLLLLPPPLLGDQVGPCRSLGSRGRGSSGACAPMGWLCPSSASNLWLYTSRCRDAGTELTGHLVPHHDGLRVWCPESEAHIPLPPAPEGCPWSCRLLGIGGHLSPQGKLTLPEEHPCLKAPRLRCQSCKLAQAPGLRAGERSPEESLGGRRKRNVNTAPQFQPPSYQATVPENQPAGTPVASLRAIDPDEGEAGRLEYTMDALFDSRSNQFFSLDPVTGAVTTAEELDRETKSTHVFRVTAQDHGMPRRSALATLTILVTDTNDHDPVFEQQEYKESLRENLEVGYEVLTVRATDGDAPPNANILYRLLEGSGGSPSEVFEIDPRSGVIRTRGPVDREEVESYQLTVEASDQGRDPGPRSTTAAVFLSVEDDNDNAPQFSEKRYVVQVREDVTPGAPVLRVTASDRDKGSNAVVHYSIMSGNARGQFYLDAQTGALDVVSPLDYETTKEYTLRVRAQDGGRPPLSNVSGLVTVQVLDINDNAPIFVSTPFQATVLESVPLGYLVLHVQAIDADAGDNARLEYRLAGVGHDFPFTINNGTGWISVAAELDREEVDFYSFGVEARDHGTPALTASASVSVTVLDVNDNNPTFTQPEYTVRLNEDAAVGTSVVTVSAVDRDAHSVITYQITSGNTRNRFSITSQSGGGLVSLALPLDYKLERQYVLAVTASDGTRQDTAQIVVNVTDANTHRPVFQSSHYTVNVNEDRPAGTTVVLISATDEDTGENARITYFMEDSIPQFRIDADTGAVTTQAELDYEDQVSYTLAITARDNGIPQKSDTTYLEILVNDVNDNAPQFLRDSYQGSVYEDVPPFTSVLQISATDRDSGLNGRVFYTFQGGDDGDGDFIVESTSGIVRTLRRLDRENVAQYVLRAYAVDKGMPPARTPMEVTVTVLDVNDNPPVFEQDEFDVFVEENSPIGLAVARVTATDPDEGTNAQIMYQIVEGNIPEVFQLDIFSGELTALVDLDYEDRPEYVLVIQATSAPLVSRATVHVRLLDRNDNPPVLGNFEILFNNYVTNRSSSFPGGAIGRVPAHDPDISDSLTYSFERGNELSLVLLNASTGELKLSRALDNNRPLEAIMSVLVSDGVHSVTAQCALRVTIITDEMLTHSITLRLEDMSPERFLSPLLGLFIQAVAATLATPPDHVVVFNVQRDTDAPGGHILNVSLSVGQPPGPGGGPPFLPSEDLQERLYLNRSLLTAISAQRVLPFDDNICLREPCENYMRCVSVLRFDSSAPFIASSSVLFRPIHPVGGLRCRCPPGFTGDYCETEVDLCYSRPCGPHGRCRSREGGYTCLCRDGYTGEHCEVSARSGRCTPGVCKNGGTCVNLLVGGFKCDCPSGDFEKPYCQVTTRSFPAHSFITFRGLRQRFHFTLALSFATKERDGLLLYNGRFNEKHDFVALEVIQEQVQLTFSAGESTTTVSPFVPGGVSDGQWHTVQLKYYNKPLLGQTGLPQGPSEQKVAVVTVDGCDTGVALRFGSVLGNYSCAAQGTQGGSKKSLDLTGPLLLGGVPDLPESFPVRMRQFVGCMRNLQVDSRHIDMADFIANNGTVPGCPAKKNVCDSNTCHNGGTCVNQWDAFSCECPLGFGGKSCAQEMANPQHFLGSSLVAWHGLSLPISQPWYLSLMFRTRQADGVLLQAITRGRSTITLQLREGHVMLSVEGTGLQASSLRLEPGRANDGDWHHAQLALGASGGPGHAILSFDYGQQRAEGNLGPRLHGLHLSNITVGGIPGPAGGVARGFRGCLQGVRVSDTPEGVNSLDPSHGESINVEQGCSLPDPCDSNPCPANSYCSNDWDSYSCSCDPGYYGDNCTNVCDLNPCEHQSVCTRKPSAPHGYTCECPPNYLGPYCETRIDQPCPRGWWGHPTCGPCNCDVSKGFDPDCNKTSGECHCKENHYRPPGSPTCLLCDCYPTGSLSRVCDPEDGQCPCKPGVIGRQCDRCDNPFAEVTTNGCEVNYDSCPRAIEAGIWWPRTRFGLPAAAPCPKGSFGTAVRHCDEHRGWLPPNLFNCTSITFSELKGFAERLQRNESGLDSGRSQQLALLLRNATQHTAGYFGSDVKVAYQLATRLLAHESTQRGFGLSATQDVHFTENLLRVGSALLDTANKRHWELIQQTEGGTAWLLQHYEAYASALAQNMRHTYLSPFTIVTPNIVISVVRLDKGNFAGAKLPRYEALRGEQPPDLETTVILPESVFRETPPVVRPAGPGEAQEPEELARRQRRHPELSQGEAVASVIIYRTLAGLLPHNYDPDKRSLRVPKRPIINTPVVSISVHDDEELLPRALDKPVTVQFRLLETEERTKPICVFWNHSILVSGTGGWSARGCEVVFRNESHVSCQCNHMTSFAVLMDVSRRENGEILPLKTLTYVALGVTLAALLLTFFFLTLLRILRSNQHGIRRNLTAALGLAQLVFLLGINQADLPFACTVIAILLHFLYLCTFSWALLEALHLYRALTEVRDVNTGPMRFYYMLGWGVPAFITGLAVGLDPEGYGNPDFCWLSIYDTLIWSFAGPVAFAVSMSVFLYILAARASCAAQRQGFEKKGPVSGLQPSFAVLLLLSATWLLALLSVNSDTLLFHYLFATCNCIQGPFIFLSYVVLSKEVRKALKLACSRKPSPDPALTTKSTLTSSYNCPSPYADGRLYQPYGDSAGSLHSTSRSGKSQPSYIPFLLREESALNPGQGPPGLGDPGSLFLEGQDQQHDPDTDSDSDLSLEDDQSGSYASTHSSDSEEEEEEEEEEAAFPGEQGWDSLLGPGAERLPLHSTPKDGGPGPGKAPWPGDFGTTAKESSGNGAPEERLRENGDALSREGSLGPLPGSSAQPHKGILKKKCLPTISEKSSLLRLPLEQCTGSSRGSSASEGSRGGPPPRPPPRQSLQEQLNGVMPIAMSIKAGTVDEDSSGSEFLFFNFLH

SEQ ID NO: 155 - DNA, 2442 bp, Homo sapiens
acgacccggagcgaaggtctcgcgaggcctgggcgctgcggcggcaggaggaggacggggaaggacggagccgagccgcggctgcctccctcgctcactccctcgcgcactcgcccgccccctccctccctcccctcccttccccggccccggctctggccccggcccattcgctgttgggtcttctgctagggaggatgtcgggttcgtcgctgcccagcgccctggccctctcgctgttgctggtctctggctccctcctcccagggccaggcgccgctcagaacgctgggtttgtcaagtcgcccatgtcagaaactaagctcacgggggacgcctttgagctgtactgtgacgtggtcgggagccccacgccagagatccagtggtggtacgcagaagtcaaccgggcagagtctttcagacagctgtgggacggtgctcggaagcgccgtgtcaccgtaaacaccgcctacgggtcaaacggcgtgagtgtgctgagaataacccggctcaccttggaggactctgggacttacgagtgcagggccagcaacgaccccaagaggaatgacttgaggcaaaacccctccataacatggattcgagcccaggccaccataagcgtccttcagaagccaaggattgtcaccagtgaagaggtcattattcgagacagccctgttctccctgtcaccctgcagtgtaacctcacctccagctctcacacccttacatacagctactggacaaagaatggggtggaactgagtgccactcgtaagaatgccagcaacatggagtacaggatcaataagccgagagctgaggattcaggcgaataccactgcgtatatcactttgtcagcgctcctaaagcaaacgccaccattgaagtgaaagccgctcctgacatcactggccataaacggagtgagaacaagaatgaagggcaggatgccactatgtattgcaagtcagttggctacccccacccagactggatatggcgcaagaaggagaacgggatgcccatggacattgtcaatacctctggccgcttcttcatcatcaacaaggaaaattacactgagttgaacattgtgaacctgcagatcacggaagaccctggcgagtatgaatgtaatgccaccaacgccattggctccgcctctgttgtcactgtcctcagggtgcggagccacctggccccactctggcctttcttgggaattctggctgaaattatcatccttgtggtgatcattgttgtgtatgagaagaggaagaggccagatgaggttcctgacgctggaccaatgaaaaccaactctaccaacaatcacaaagataaaaacttgcgccagagaaacacaaattaagtactgcttacaatatctttaggttcctgaaactggtggcaacatgacctgctaaaattttctgcttggacctctttggttctctcccctttcaagtgagcaacaccacaatgactgtctaaagcatgccttatttagcctctcctgtaagggtgatctagccaggtacattttaaacaatgcttcagtgtagaaggtgtaaactattttgggcttgatgtgctgtgaatgttgcttttttttttcctttgttaaaatatttaaatagaagtgaaaaggtcctctgaggatcagatcatgcatgcgccattttttacttaatgcagctgttaaattggcaaagctctaaaatgcactgctgccatctagtgatacacttttgtaaagtacagcaaaacctacagatatatacagtatataaatatatatatatatatatttatatttttgggggtgggagaaatccaaaataaagtaaatgcttgtttcatttttaagctgctgatattcattccttattgtatgttgtcagatgaggaaattgtgcagttctggtacataaagatgagtaatataaactgaaatctataattttaagggcttaacctgtgactttaataagctggaacagtccactgaatgggtataatgaattgcagtatatacgtatgattgctttttaagtgattatcttttcttctgttaagtcatgtaaattcataaatccttttgcactgatgtgttgaaccttattcttgtacattcattcaatcaaggcaaacttttataatttttcttttgtttccaatgaccttgaaatgttatagcatggtaatattctatgcaactatagttatactttttggtttgacactgtattttttcacattgatttactggttgatgatagattttataacctaacggttctcatgcggtgcgtaattgtagatgcatgtacttgtgtgttttgtgtaattattgaagtgcaatgatgtataaaaaagtggattcacctgtttttaaaaataaaacattgataaaaggtgtttggataata

SEQ ID NO: 156 - protein, 398 aa, Homo sapiens
MSGSSLPSALALSLLLVSGSLLPGPGAAQNAGFVKSPMSETKLTGDAFELYCDVVGSPTPEIQWWYAEVNRAESFRQLWDGARKRRVTVNTAYGSNGVSVLRITRLTLEDSGTYECRASNDPKRNDLRQNPSITWIRAQATISVLQKPRIVTSEEVIIRDSPVLPVTLQCNLTSSSHTLTYSYWTKNGVELSATRKNASNMEYRINKPRAEDSGEYHCVYHFVSAPKANATIEVKAAPDITGHKRSENKNEGQDATMYCKSVGYPHPDWIWRKKENGMPMDIVNTSGRFFIINKENYTELNIVNLQITEDPGEYECNATNAIGSASVVTVLRVRSHLAPLWPFLGILAEIIILVVIIVVYEKRKRPDEVPDDDEPAGPMKTNSTNNHKDKNLRQRNTN

SEQ ID NO: 157 - DNA, 2251 bp, Homo sapiens
gcgcaacgtcatttccgcgtacgggggagggcgggcctggagtctgagccggcgccgctcagtgtgaggtggtttctgcgggtgaggctggcgcccgtaccatgagcgaggcggacgggctgcgacagcgccggcccctgcggccgcaggtcgtcacagacgatgatggccaggccccggaggctaaggacggcagctcctttagcggcagagttttccgagtgaccttcttgatgctggctgtttctctcaccgttcccctgcttggagccatgatgctgctggaatctcctatagatccacagcctctcagcttcaaagaacccccgctcttgcttggtgttctgcatccaaatacgaagctgcgacaggcagaaaggctgtttgaaaatcaacttgttggaccggagtccatagcacatattggggatgtgatgtttactgggacagcagatggccgggtcgtaaaacttgaaaatggtgaaatagagaccattgcccggtttggttcgggcccttgcaaaacccgagatgatgagcctgtgtgtgggagacccctgggtatccgtgcagggcccaatgggactctctttgtggccgatgcatacaagggactatttgaagtaaatccctggaaacgtgaagtgaaactgctgctgtcctccgagacacccattgaggggaagaacatgtcctttgtgaatgatcttacagtcactcaggatgggaggaagatttatttcaccgattctagcagcaaatggcaaagacgagactacctgcttctggtgatggagggcacagatgacgggcgcctgctggagtatgatactgtgaccagggaagtaaaagttttattggaccagctgcggttcccgaatggagtccagctgtctcctgcagaagactttgtcctggtggcagaaacaaccatggccaggatacgaagagtctacgtttctggcctgatgaagggcggggctgatctgtttgtggagaacatgcctggatttccagacaacatccggcccagcagctctggggggtactgggtgggcatgtcgaccatccgccctaaccctgggttttccatgctggatttcttatctgagagaccctggattaaaaggatgatttttaagctctttagtcaagagacggtgatgaagtttgtgccgcggtacagcctcgtcctagaactcagcgacagcggtgccttccggagaagcctgcatgatcccgatgggctggtggccacctacatcagcgaggtgcacgaacacgatgggcacctgtacctgggctctttcaggtcccccttcctctgcagactcagcctccaggctgtttagccctcccagatagctgcccctgccacgcaggccaggagtcttcacactcaggcaccaggcctggtccaggaggagctgtggacacagtcgtggttcaagtgtccacatgcacctgttagtccctgagaggtggtgggaatggctgcttcattcctcgaggatgcccgggccccacctgggcttgtctttctgtttagagggaagtgtaacatatctgccatgaggaacataaattcatgtaaagccattttctcttaaacaaaacaaaactttctaagtacagtcattctctaggatttgggaagctccttgcacttggaacagggctcaggtgggtggagcagtaaggcactacccagagagcttgctgctgcggccctgtcctgcggcctcaaagttcttctttactatatataacgtgcggtcatacctttcttcgttgtggtggggatggaagagcagagggagcatggcccaggggtgttgaggccagcggtgagagccgtgttagccaagacatggaactgtgttctcaagggttatgtggggcgtgggctctccatagtgtgtatgaaaagcttgttgactctagcggctcagagaggactttgctgggtttctttctgtgaatatctccgtgctgaccatgctggaattggatgattctgcaattcgggacctactgcaggggtccgtttagtaacgtcttgtctgtgatctttgttcttgacctctagaccccaagatgtgaacagtgcacgtgttaatgtcatctttgctcatgtgttataagccccaagttgctgtatattttcacaagtatgtctacacactggtcatgattttgataataaataacgataaatcgaaaaaaaaaaaaaaaaaaaaaaaaaaaaaaa

SEQ ID NO: 158 - protein, 416 aa, Homo sapiens
MSEADGLRQRRPLRPQVVTDDDGQAPEAKDGSSFSGRVFRVTFLMLAVSLTVPLLGAMMLLESPIDPQPLSFKEPPLLLGVLHPNTKLRQAERLFENQLVGPESIAHIGDVMFTGTADGRVVKLENGEIETIARFGSGPCKTRDDEPVCGRPLGIRAGPNGTLFVADAYKGLFEVNPWKREVKLLLSSETPIEGKNMSFVNDLTVTQDGRKIYFTDSSSKWQRRDYLLLVMEGTDDGRLLEYDTVTREVKVLLDQLRFPNGVQLSPAEDFVLVAETTMARIRRVYVSGLMKGGADLFVENMPGFPDNIRPSSSGGYWVGMSTIRPNPGFSMLDFLSERPWIKRMIFKLFSQETVMKFVPRYSLVLELSDSGAFRRSLHDPDGLVATYISEVHEHDGHLYLGSFRSPFLCRLSLQAV

SEQ ID NO: 159 - DNA, 2785 bp, Homo sapiens
gagagagagagagagagagagagagagagagagcgagagagcgtgagcgcgcgcaagctagcgagcaaaccagagagacagaccgagagagggaccaggagagagacccagagagagaagaagaagccagaagccgagctctgtcagggctcaacctccaacttgtttcagttcattcatccttctctcctttccgctcagactgtagagctcggtctctccaagtttgtgcctaagaagatgataatcacacaaacaagtcactgttacatgaccagccttgggattcttttcctgattaatattctccctggaaccactggtcaaggggaatcaagacgacaagaacccggggactttgtgaagcaggacattggcgggctgtctcctaagcatgccccagatattcctgatgacagcactgacaacatcactatcttcaccagaatcttggatcgtcttctggacggctatgacaaccggctgcgacctgggcttggagatgcagtgactgaagtgaagactgacatctacgtgaccagttttggccctgtgtcagacactgacatggagtacactattgatgtattttttcggcagacatggcatgatgaaagactgaaatttgatggccccatgaagatccttccactgaacaatctcctggctagtaagatctggacaccggacaccttcttccacaatggcaagaaatcagtggctcataacatgaccacgcccaacaagctgctcagattggtggacaacggaaccctcctctatacaatgaggttaacaattcatgctgagtgtcccatgcatttggaagattttcccatggatgtgcatgcctgcccactgaagtttggaagctatgcctatacaacagctgaagtggtttattcttggactctcggaaagaacaaatccgtggaagtggcacaggatggttctcgcttgaaccagtatgaccttttgggccatgttgttgggacagagataatccggtctagtacaggagaatatgtcgtcatgacaacccacttccatctcaagcgaaaaattggctactttgtgatccagacctacttgccatgtatcatgactgtcattctgtcacaagtgtcgttctggctcaacagagagtctgttcctgcccgtacagtctttggtgtcaccactgtgcttaccatgaccaccttgagtatcagtgccagaaattccttacctaaagtggcatatgcgacggccatggactggttcatagccgtctgttatgcctttgtattttctgcactgattgaatttgccactgtcaactatttcaccaagcggagttgggcttgggaaggcaagaaggtgccagaggccctggagatgaagaagaaaacaccagcagccccagcaaagaaaaccagcactaccttcaacatcgtggggaccacctatcccatcaacctggccaaggacactgaattttccaccatctccaagggcgctgctcccagtgcctcctcaaccccaacaatcattgcttcacccaaggccacctacgtgcaggacagcccgactgagaccaagacctacaacagtgtcagcaaggttgacaaaatttcccgcatcatctttcctgtgctctttgccatattcaatctggtctattgggccacatatgtcaaccgggagtcagctatcaagggcatgatccgcaaacagtagatagtggtggcagtgcagcaaccagagcactgtataccccgtgaagcatccaggcacccaaaccccggggctccccttcgcgtatttcaggattctcctttttacccctctaccaagctgtgaccctcaattcatatttatgaatctctacgcaaaaaataactacagaaaaattacttgtccctccaatattgcccagtataaccccatcaaagccaaacactgccatttgtccagttgctcatcttagtctgccaatctcccctagctgagggcactgcatgtattttattgcactctgcccgctgcaaaaagaacaagagattctactctccatagtggaagccttggctgtttgagaggcccagaacaaggagaattgttgactcccatctagatcagatgactctaacttactaggcagccaggttaggctaggccatgtgatcctgcgtgccacctcccctgccttcagcaaggcctactaggcataagtactgatagcaaaggtgggagccagttctacacccccaacccatttattggtttggaaattagtggggacaattggtactaaccaccgtctaccatgtatggccaaaataaatagaactagctctgccagcctggcaccaagatggctggtgccctgccatgtccagcccctcgggaaaatagtcccctccttggtacatctctcctccagaaaatcttcttcccccactgcctttggcacccttgtagccaactgagcactacttaatttggactcattaccacctgtaaacttttcaggaaaaaatgatcaagcattttttatttatatcgaaaagttgcaaatagaaacaaagtgatctagatttaaaaaaaacatttttttaaaatatgggagagatacaaaagtcacctccctgccaaggcaactagcctatactggattgggtaagaggtttggagtggatggtagttgaggattgaagtctggctcaaaagagaaggctactggcagatgaaagtcaaattcttccttccatacactccacattccacaccctggcccaggcac

SEQ ID NO: 160 - protein, 492 aa, Homo sapiens
MIITQTSHCYMTSLGILFLINILPGTTGQGESRRQEPGDFVKQDIGGLSPKHAPDIPDDSTDNITIFTRILDRLLDGYDNRLRPGLGDAVTEVKTDIYVTSFGPVSDTDMEYTIDVFFRQTWHDERLKFDGPMKILPLNNLLASKIWTPDTFFHNGKKSVAHNMTTPNKLLRLVDNGTLLYTMRLTIHAECPMHLEDFPMDVHACPLKFGSYAYTTAEVVYSWTLGKNKSVEVAQDGSRLNQYDLLGHVVGTEIIRSSTGEYVVMTTHFHLKRKIGYFVIQTYLPCIMTVILSQVSFWLNRESVPARTVFGVTTVLTMTTLSISARNSLPKVAYATAMDWFIAVCYAFVFSALIEFATVNYFTKRSWAWEGKKVPEALEMKKKTPAAPAKKTSTTFNIVGTTYPINLAKDTEFSTISKGAAPSASSTPTIIASPKATYVQDSPTETKTYNSVSKVDKISRIIFPVLFAIFNLVYWATYVNRESAIKGMIRKQ

SEQ ID NO: 161 - DNA, 5561 bp, Homo sapiens
aaagcagcagagacgctgcagagggcttttcttagacatcaactgcagacggctggcaggatagaagcagcggctcacttggactttttcaccagggaaatcagagacaatgatggggctcttccccagaactacaggggctctggccatcttcgtggtggtcatattggttcatggagaattgcgaatagagactaaaggtcaatatgatgaagaagagatgactatgcaacaagctaaaagaaggcaaaaacgtgaatgggtgaaatttgccaaaccctgcagagaaggagaagataactcaaaaagaaacccaattgccaagattacttcagattaccaagcaacccagaaaatcacctaccgaatctctggagtgggaatcgatcagccgccttttggaatctttgttgttgacaaaaacactggagatattaacataacagctatagtcgaccgggaggaaactccaagcttcctgatcacatgtcgggctctaaatgcccaaggactagatgtagagaaaccacttatactaacggttaaaattttggatattaatgataatcctccagtattttcacaacaaattttcatgggtgaaattgaagaaaatagtgcctcaaactcactggtgatgatactaaatgccacagatgcagatgaaccaaaccacttgaattctaaaattgccttcaaaattgtctctcaggaaccagcaggcacacccatgttcctcctaagcagaaacactggggaagtccgtactttgaccaattctcttgaccgagagcaagctagcagctatcgtctggttgtgagtggtgcagacaaagatggagaaggactatcaactcaatgtgaatgtaatattaaagtgaaagatgtcaacgataacttcccaatgtttagagactctcagtattcagcacgtattgaagaaaatattttaagttctgaattacttcgatttcaagtaacagatttggatgaagagtacacagataattggcttgcagtatatttctttacctctgggaatgaaggaaattggtttgaaatacaaactgatcctagaactaatgaaggcatcctgaaagtggtgaaggctctagattatgaacaactacaaagcgtgaaacttagtattgctgtcaaaaacaaagctgaatttcaccaatcagttatctctcgataccgagttcagtcaaccccagtcacaattcaggtaataaatgtaagagaaggaattgcattccgtcctgcttccaagacatttactgtgcaaaaaggcataagtagcaaaaaattggtggattatatcctgggaacatatcaagccatcgatgaggacactaacaaagctgcctcaaatgtcaaatatgtcatgggacgtaacgatggtggatacctaatgattgattcaaaaactgctgaaatcaaatttgtcaaaaatatgaaccgagattctactttcatagttaacaaaacaatcacagctgaggttctggccatagatgaatacacgggtaaaacttctacaggcacggtatatgttagagtacccgatttcaatgacaattgtccaacagctgtcctcgaaaaagatgcagtttgcagttcttcaccttccgtggttgtctccgctagaacactgaataatagatacactggcccctatacatttgcactggaagatcaacctgtaaagttgcctgccgtatggagtatcacaaccctcaatgctacctcggccctcctcagagcccaggaacagatacctcctggagtataccacatctccctggtacttacagacagtcagaacaatcggtgtgagatgccacgcagcttgacactggaagtctgtcagtgtgacaacaggggcatctgtggaacttcttacccaaccacaagccctgggaccaggtatggcaggccgcactcagggaggctggggcctgccgccatcggcctgctgctccttggtctcctgctgctgctgttggccccccttctgctgttgacctgtgactgtggggcaggttctactgggggagtgacaggtggttttatcccagttcctgatggctcagaaggaacaattcatcagtggggaattgaaggagcccatcctgaagacaaggaaatcacaaatatttgtgtgcctcctgtaacagccaatggagccgatttcatggaaagttctgaagtttgtacaaatacgtatgccagaggcacagcggtggaaggcacttcaggaatggaaatgaccactaagcttggagcagccactgaatctggaggtgctgcaggctttgcaacagggacagtgtcaggagctgcttcaggattcggagcagccactggagttggcatctgttcctcagggcagtctggaaccatgagaacaaggcattccactggaggaaccaataaggactacgctgatggggcgataagcatgaattttctggactcctacttttctcagaaagcatttgcctgtgcggaggaagacgatggccaggaagcaaatgactgcttgttgatctatgataatgaaggcgcagatgccactggttctcctgtgggctccgtgggttgttgcagttttattgctgatgacctggatgacagcttcttggactcacttggacccaaatttaaaaaacttgcagagataagccttggtgttgatggtgaaggcaaagaagttcagccaccctctaaagacagcggttatgggattgaatcctgtggccatcccatagaagtccagcagacaggatttgttaagtgccagactttgtcaggaagtcaaggagcttctgctttgtccacctctgggtctgtccagccagctgtttccatccctgaccctctgcagcatggtaactatttagtaacggagacttactcggcttctggttccctcgtgcaaccttccactgcaggctttgatccacttctcacacaaaatgtgatagtgacagaaagggtgatctgtcccatttccagtgttcctggcaacctagctggcccaacgcagctacgagggtcacatactatgctctgtacagaggatccttgctcccgtctaatatgaccagaatgagctggaataccacactgaccaaatctggatctttggactaaagtattcaaaatagcatagcaaagctcactgtattgggctaataatttggcacttattagcttctctcataaactgatcacgattataaattaaatgtttgggttcataccccaaaagcaatatgttgtcactcctaattctcaagtactattcaaattgtagtaaatcttaaagtttttcaaaaccctaaaatcatattcgccaggaaattttcctaaacattcttaagcttctatttttcccctgccaaaggaaggtgtttatcattttaaaatgcaatgtgatttagtggattaagcaggagcgctggttcttgtctccattgccttttcttatatcattgataatgatgtaagaatcacaaggggccgggcgcggtggctcacgcctgtaatcccagcactttgggaggccgaggcaggtggatcatgaggtcaggagatcgagaccatcctggctaacaaggtgaaaccccgtctctactaaaaatacaaaaaattagccgggcgcagtggcgggcgcctgtagtcccagctactcgggaggctgaggcaggagaatggcatgaacccgggaagcggagcttgcagtgagccgagattgcgccactgcagtccgcagtccggcctgggcgacagagcgagactccgtctcaaaaaaaaaaaaaaaaaaagaatcacaaggtatttgctaaagcattttgagctgcttggaaaaagggaagtagttgcagtagagtttcttccatcttcttggtgctgggaagccatatatgtgtcttttactcaagctaaggggtataagcttatgtgttgaatttgctacatctatatttcacatattctcacaataagagaattttgaaatagaaatatcatagaacatttaagaaagtttagtataaataatattttgtgtgttttaatccctttgaagggatctatccaaagaaaatattttacactgagctccttcctacacgtctcagtaacagatcctgtgttagtctttgaaaatagctcattttttaaatgtcagtgagtagatgtagcatacatatgatgtataatgacgtgtattatgttaacaatgtctgcagattttgtaggaatacaaaacatggccttttttataagcaaaacgggccaatgactagaataacacatagggcaatctgtgaatatgtattataagcagcattccagaaaagtagttggtgaaataattttcaagtcaaaaagggatatggaaagggaattatgagtaacctctattttttaagccttgcttttaaattaaacagctacagccatttaagccttgaggataataaagcttgagagtaataatgttaggttagcaaaggtttagatgtatcacttcatgcatgctaccatgatagtaatgcagctcttcgagtcatttctggtcattcaagatattcacccttttgcccatagaaagcaccctacctcacctgcttactgacattgtcttagctgatcacaagatcattatcagcctccattattccttactgtatataaaatacagagttttatattttcctttcttcgtttttcaccatattcaaaacctaaatttgtttttgcagatggaatgcaaagtaatcaagtgtttgtgctttcacctagaagggtgtggtcctgaaggaaagaggtcccctaaatatcccccaccctggtgctcctccctctccctggtaccctgactaccaggaagtcaggtgctagagcagctggagaagtgcaggcagcctgtgcttccacagatgggggtgctgctgcaacaaggctttcaatgtgcccatcttaggtgggagaagctagatcctgtgcagcagcctggtaagtcctgaggaggttccattgctcttcctgctgctgtcctttgcttctcaacggtggctcgctctacagtctagagcacatgcagctaacttgtgcctctgcttatgcatgagggttaaattaacaaccataaccttcatttgaagttcaaaggtgtattcaggatcctcaaagcattttaaccttgccgcttaaaacccaatttaccgtgaaatgggaattttgctgcattgttaaactgtagtggaaaccatgctatagtaataaaggttatataagagagaaattgaaattaaatgtgtttttaaatttcaaaaaaaaatcaatctttaggatgacttaaaaattgatttgccatgtaaaatgtatctgcattttttacacaaaacttgttttaagcataaaattttaaaactgtactacttgatgtattatacattttgaaccatatgtattaaaccataaacagtataatgttgttataataaaacaggcaataaatttataaataaaagctgaaaaaaaaaaaa

SEQ ID NO: 162 - protein, 999 aa, Homo sapiens
MMGLFPRTTGALAIFVVVILVHGELRIETKGQYDEEEMTMQQAKRRQKREWVKFAKPCREGEDNSKRNPIAKITSDYQATQKITYRISGVGIDQPPFGIFVVDKNTGDINITAIVDREETPSFLITCRALNAQGLDVEKPLILTVKILDINDNPPVFSQQIFMGEIEENSASNSLVMILNATDADEPNHLNSKIAFKIVSQEPAGTPMFLLSRNTGEVRTLTNSLDREQASSYRLVVSGADKDGEGLSTQCECNIKVKDVNDNFPMFRDSQYSARIEENILSSELLRFQVTDLDEEYTDNWLAVYFFTSGNEGNWFEIQTDPRTNEGILKVVKALDYEQLQSVKLSIAVKNKAEFHQSVISRYRVQSTPVTIQVINVREGIAFRPASKTFTVQKGISSKKLVDYILGTYQAIDEDTNKAASNVKYVMGRNDGGYLMIDSKTAEIKFVKNMNRDSTFIVNKTITAEVLAIDEYTGKTSTGTVYVRVPDFNDNCPTAVLEKDAVCSSSPSVVVSARTLNNRYTGPYTFALEDQPVKLPAVWSITTLNATSALLRAQEQIPPGVYHISLVLTDSQNNRCEMPRSLTLEVCQCDNRGICGTSYPTTSPGTRYGRPHSGRLGPAAIGLLLLGLLLLLLAPLLLLTCDCGAGSTGGVTGGFIPVPDGSEGTIHQWGIEGAHPEDKEITNICVPPVTANGADFMESSEVCTNTYARGTAVEGTSGMEMTTKLGAATESGGAAGFATGTVSGAASGFGAATGVGICSSGQSGTMRTRHSTGGTNKDYADGAISMNFLDSYFSQKAFACAEEDDGQEANDCLLIYDNEGADATGSPVGSVGCCSFIADDLDDSFLDSLGPKFKKLAEISLGVDGEGKEVQPPSKDSGYGIESCGHPIEVQQTGFVKCQTLSGSQGASALSTSGSVQPAVSIPDPLQHGNYLVTETYSASGSLVQPSTAGFDPLLTQNVIVTERVICPISSVPGNLAGPTQLRGSHTMLCTEDPCSRLI

SEQ ID NO: 163 - DNA, 6369 bp, Homo sapiens
cccacgcgtccggccttggcggcggacgtgcagagaatctcgatgctggcctggagcagaaactgagctggaccactggagcctcggtgagggggtgcggggggcaatggcactgcagctctgggccctgaccctgctgggcctgctgggcgcaggtgccagcctgaggccccgcaagctggacttcttccgcagcgagaaagagctgaaccacctggctgtggatgaggcctcaggcgtggtgtacctgggggcggtgaatgccctctaccagctggatgcgaagctgcagctggagcagcaggtggccacgggcccggccctggacaacaagaagtgcacgccgcccatcgaggccagccagtgccatgaggctgagatgactgacaatgtcaaccagctgctgctgctcgaccctcccaggaagcgcctggtggagtgcggcagcctcttcaagggcatctgcgctctgcgcgccctgagcaacatctccctccgcctgttctacgaggacggcagcggggagaagtctttcgtggccagcaatgatgagggcgtggccacagtggggctggtgagctccacgggtcctggtggtgaccgcgtgctgtttgtgggcaaaggcaatgggccacacgacaacggcatcatcgtgagcactcggctgttggaccggactgacagcagggaggcctttgaagcctacacggaccacgccacctacaaggccggctacctgtccaccaacacacagcagttcgtggcggccttcgaggacggcccctacgtcttctttgtcttcaaccagcaggacaagcacccggcccggaaccgcacgctgctggcacgcatgtgcagagaagaccccaactactactcctacctggagatggacctgcagtgccgggaccccgacatccacgccgctgcctttggcacctgcctggccgcctccgtggctgcgcctggctctggcagggtgctatatgctgtcttcagcagagacagccggagcagtggggggcccggtgcgggcctctgcctgttcccgctggacaaggtgcacgccaagatggaggccaaccgcaacgcctgttacacaggcacccgggaggcccgtgacatcttctacaagcccttccacggcgatatccagtgcggcggccacgcgccgggctccagcaagagcttcccatgtggctcggagcacctgccctacccgctgggcagccgcgacgggctcagaggcacagccgtgctgcagcgtggaggcctgaacctcacggccgtgacggtcgccgccgagaacaaccacactgttgcttttctgggcacctctgatggccggatcctcaaggtgtacctcaccccagatggcacctcctcagagtacgactctatccttgtggagataaacaagagagtcaagcgcgacctggtactgtctggagacctgggcagcctgtacgccatgacccaggacaaggtgttccggctgccggtgcaggagtgcctgagctacccgacctgcacccagtgccgcgactcccaggacccctactgcggctggtgcgtcgtcgagggacgatgcacccggaaggccgagtgtccgcgggccgaggaggccagccactggctgtggagccgaagcaagtcctgcgtggccgtcaccagcgcccagccacagaacatgagccggcgggcccagggggaggtgcagctgaccgtcagccccctccctgccctgagcgaggaggacgagttgctgtgcctttttggggagtcgccgccacaccccgcccgcgtggagggcgaggccgtcatctgcaactccccaagcagcatccccgtcacaccgccaggccaggaccacgtggccgtgaccatccagctcctccttagacgaggcaacatcttcctcacgtcctaccagtaccccttctacgactgccgccaggccatgagcctggaggagaacctgccgtgcatctcctgcgtgagcaaccgctggacctgccagtgggacctgcgctaccacgagtgccgggaggcttcgcccaaccctgaggacggcatcgtccgtgcccacatggaggacagctgtccccagttcctgggacccagccccctggtgatccccatgaaccacgagacagatgtgaacttccagggcaagaacctggacaccgtgaagggttcctccctgcacgtgggcagtgacttgctcaagttcatggagccggtgaccatgcaggaatctgggaccttcgcctttcggaccccaaagctgtcccacgatgccaacgagacgctgcccctgcacctctacgtcaagtcttacggcaagaatatcgacagcaagctccatgtgaccctctacaactgctcctttggccgcagcgactgcagcctgtgccgggccgctaaccccgactacaggtgtgcgtggtgcgggggccagagcaggtgcgtgtatgaggccctgtgcaacaccacctccgagtgcccgccgcccgtcatcaccaggatccagcctgagacgggccccctgggtgggggcatccgcatcaccatcctggggtccaatttgggcgtccaagcaggggacatccagaggatctctgtggccggccggaactgctcctttcagccggaacgttactccgtgtccacccggatcgtgtgtgtgatcgaggctgcggagacgcctttcacggggggtgtcgaggtggacgtcttcgggaaactgggccgttcgcctcccaatgtccagttcaccttccaacagcccaagcctctcagtgtggagccgcagcagggaccgcaggcgggcggcaccacactgaccatccacggcacccacctggacacgggctcccaggaggacgtgcgggtgaccctcaacggcgtcccgtgtaaagtgacgaagtttggggcgcagctccagtgtgtcactggcccccaggcgacacggggccagatgcttctggaggtctcctacggggggtcccccgtgcccaaccccggcatcttcttcacctaccgcgaaaaccccgtactgcgagccttcgagccgctacgaagctttgccagtggtggccgcagcatcaacgtcacgggtcagggcttcagcctgatccagaggtttgccatggtggtcatcgcggagcccctgcagtcctggcagccgccgcgggaggctgaatccctgcagcccatgacggtggtgggtacagactacgtgttccacaatgacaccaaggtcgtcttcctgtccccggctgtgcctgaggagccagaggcctacaacctcacggtgctgatcgagatggacgggcaccgtgccctgctcagaacagaggccggggccttcgagtacgtgcctgaccccacctttgagaacttcacaggtggcgtcaagaagcaggtcaacaagctcatccacgcccggggcaccaatctgaacaaggcgatgacgctgcaggaggccgaggccttcgtgggtgccgagcgctgcaccatgaagacgctgacggagaccgacctgtactgtgagcccccggaggtgcagcccccgcccaagcggcggcagaaacgagacaccacacacaacctgcccgagttcattgtgaagttcggctctcgcgagtgggtgctgggccgcgtggagtacgacacacgggtgagcgacgtgccgctcagcctcatcttgccgctggtcatcgtgcccatggtggtcgtcatcgcggtgtctgtctactgctactggaggaagagccagcaggccgaacgagagtatgagaagatcaagtcccagctggagggcctggaggagagcgtgcgggaccgctgcaagaaggaattcacagacctgatgatcgagatggaggaccagaccaacgacgtgcacgaggccggcatccccgtgctggactacaagacctacaccgaccgcgtcttcttcctgccctccaaggacggcgacaaggacgtgatgatcaccggcaagctggacatccctgagccgcggcggccggtggtggagcaggccctctaccagttctccaacctgctgaacagcaagtctttcctcatcaatttcatccacaccctggagaaccagcgggagttctcggcccgcgccaaggtctacttcgcgtccctgctgacggtggcgctgcacgggaaactggagtactacacggacatcatgcacacgctcttcctggagctcctggagcagtacgtggtggccaagaaccccaagctgatgctgcgcaggtctgagactgtggtggagaggatgctgtccaactggatgtccatctgcctgtaccagtacctcaaggacagtgccggggagcccctgtacaagctcttcaaggccatcaaacatcaggtggaaaagggcccggtggatgcggtacagaagaaggccaagtacactctcaacgacacggggctgctgggggatgatgtggagtacgcacccctgacggtgagcgtgatcgtgcaggacgagggagtggacgccatcccggtgaaggtcctcaactgtgacaccatctcccaggtcaaggagaagatcattgaccaggtgtaccgtgggcagccctgctcctgctggcccaggccagacagcgtggtcctggagtggcgtccgggctccacagcgcagatcctgtcggacctggacctgacgtcacagcgggagggccggtggaagcgcgtcaacacccttatgcactacaatgtccgggatggagccaccctcatcctgtccaaggtgggggtctcccagcagccggaggacagccagcaggacctgcctggggagcgccatgccctcctggaggaggagaaccgggtgtggcacctggtgcggccgaccgacgaggtggacgagggcaagtccaagagaggcagcgtgaaagagaaggagcggacgaaggccatcaccgagatctacctgacgcggctgctctcagtcaagggcacactgcagcagtttgtggacaacttcttccagagcgtgctggcgcctgggcacgcggtgccacctgcagtcaagtacttcttcgacttcctggacgagcaggcagagaagcacaacatccaggatgaagacaccatccacatctggaagacgaacagcttaccgctccggttctgggtgaacatcctcaagaacccccacttcatctttgacgtgcatgtccacgaggtggtggacgcctcgctgtcagtcatcgcgcagaccttcatggatgcctgcacgcgcacggagcataagctgagccgcgattctcccagcaacaagctgctgtacgccaaggagatctccacctacaagaagatggtggaggattactacaaggggatccggcagatggtgcaggtcagcgaccaggacatgaacacacacctggcagagatttcccgggcgcacacggactccttgaacaccctcgtggcactccaccagctctaccaatacacgcagaagtactatgacgagatcatcaatgccttggaggaggatcctgccgcccagaagatgcagctggccttccgcctgcagcagattgccgctgcactggagaacaaggtcactgacctctgacctacaatctccagtgctgccttgggacataggtacctgaggtacctgagagcccctcaggggaggaggccgagtggctgtggctgaggcccccaccctcccctggaacgcgccccaagccggagtgggtgcagccggaacccgcccagcgtctagactgtagcatcttcctctgagcaataccgccgggcaccgcaccagcaccagccccagccccagctccctccggccgcagaaccagcatcgggtgttcactgtcgagtctccagtgatttgaaaatgtgccttacgctgccacgctgggggcagctggcctccgcctccgcccacgcaccagcagccgcctccatgccctaggttgggcccctgggggatctgagggcctgtggcccccagggcaagttcccagatcctatgtctgtctgtccaccacgagatgggaggaggagaaaaagcggtacgatgccttcctgacctcaccggcctccccaagggtgccggcactctgggtggactcacggctgctgggccccacgtcaaaggtcaagtgagacgtaggtcaagtcctacgtcggggcccagacatcctggggtcctggtctgtcagacaggctgccctagagccccacccagtccggggggactgggagcagttccaagaccaccccacccctttttgtaaatcttgttcattgtaaatcaaatacagcgtctttttcactctgaaaaaaaaaaaaaaaaaaaaa

SEQ ID NO: 164 - protein, 1838 aa, Homo sapiens
MALQLWALTLLGLLGAGASLRPRKLDFFRSEKELNHLAVDEASGVVYLGAVNALYQLDAKLQLEQQVATGPALDNKKCTPPIEASQCHEAEMTDNVNQLLLLDPPRKRLVECGSLFKGICALRALSNISLRLFYEDGSGEKSFVASNDEGVATVGLVSSTGPGGDRVLFVGKGNGPHDNGIIVSTRLLDRTDSREAFEAYTDHATYKAGYLSTNTQQFVAAFEDGPYVFFVFNQQDKHPARNRTLLARMCREDPNYYSYLEMDLQCRDPDIHAAAFGTCLAASVAAPGSGRVLYAVFSRDSRSSGGPGAGLCLFPLDKVHAKMEANRNACYTGTREARDIFYKPFHGDIQCGGHAPGSSKSFPCGSEHLPYPLGSRDGLRGTAVLQRGGLNLTAVTVAAENNHTVAFLGTSDGRILKVYLTPDGTSSEYDSILVEINKRVKRDLVLSGDLGSLYAMTQDKVFRLPVQECLSYPTCTQCRDSQDPYCGWCVVEGRCTRKAECPRAEEASHWLWSRSKSCVAVTSAQPQNMSRRAQGEVQLTVSPLPALSEEDELLCLFGESPPHPARVEGEAVICNSPSSIPVTPPGQDHVAVTIQLLLRRGNIFLTSYQYPFYDCRQAMSLEENLPCISCVSNRWTCQWDLRYHECREASPNPEDGIVRAHMEDSCPQFLGPSPLVIPMNHETDVNFQGKNLDTVKGSSLHVGSDLLKFMEPVTMQESGTFAFRTPKLSHDANETLPLHLYVKSYGKNIDSKLHVTLYNCSFGRSDCSLCRAANPDYRCAWCGGQSRCVYEALCNTTSECPPPVITRIQPETGPLGGGIRITILGSNLGVQAGDIQRISVAGRNCSFQPERYSVSTRIVCVIEAAETPFTGGVEVDVFGKLGRSPPNVQFTFQQPKPLSVEPQQGPQAGGTTLTIHGTHLDTGSQEDVRVTLNGVPCKVTKFGAQLQCVTGPQATRGQMLLEVSYGGSPVPNPGIFFTYRENPVLRAFEPLRSFASGGRSINVTGQGFSLIQRFAMVVIAEPLQSWQPPREAESLQPMTVVGTDYVFHNDTKVVFLSPAVPEEPEAYNLTVLIEMDGHRALLRTEAGAFEYVPDPTFENFTGGVKKQVNKLIHARGTNLNKAMTLQEAEAFVGAERCTMKTLTETDLYCEPPEVQPPPKRRQKRDTTHNLPEFIVKFGSREWVLGRVEYDTRVSDVPLSLILPLVIVPMVVVIAVSVYCYWRKSQQAEREYEKIKSQLEGLEESVRDRCKKEFTDLMIEMEDQTNDVHEAGIPVLDYKTYTDRVFFLPSKDGDKDVMITGKLDIPEPRRPVVEQALYQFSNLLNSKSFLINFIHTLENQREFSARAKVYFASLLTVALHGKLEYYTDIMHTLFLELLEQYVVAKNPKLMLRRSETVVERMLSNWMSICLYQYLKDSAGEPLYKLFKAIKHQVEKGPVDAVQKKAKYTLNDTGLLGDDVEYAPLTVSVIVQDEGVDAIPVKVLNCDTISQVKEKIIDQVYRGQPCSCWPRPDSVVLEWRPGSTAQILSDLDLTSQREGRWKRVNTLMHYNVRDGATLILSKVGVSQQPEDSQQDLPGERHALLEEENRVWHLVRPTDEVDEGKSKRGSVKEKERTKAITEIYLTRLLSVKGTLQQFVDNFFQSVLAPGHAVPPAVKYFFDFLDEQAEKHNIQDEDTIHIWKTNSLPLRFWVNILKNPHFIFDVHVHEVVDASLSVIAQTFMDACTRTEHKLSRDSPSNKLLYAKEISTYKKMVEDYYKGIRQMVQVSDQDMNTHLAEISRAHTDSLNTLVALHQLYQYTQKYYDEIINALEEDPAAQKMQLAFRLQQIAAALENKVTDL

SEQ ID NO: 165 - DNA, 1496 bp, Homo sapiens
gccgcccgggggcttttgccagcggcgccgcgggcctgcgtgctggggcagcgggcacttcttcgacctcgtcctcctcgtcctgtgcggccggccgggtgaggccgggcccgcgtagggggcagtcggcggctgcctccggcggaggtgcctcgcggcgcccgggccggcccgcgcctcggcggcgtgctccatgcatccggagcccgccccgcccccgagccgcagcagtcccgagcttcccccaagcggcggcagcaccaccagcggcagccgccggagccgccgccgcagcggggacggggagcccccgggggccccgccaccgccgccgtccgccgtcacctacccggactggatcggccagagttactccgaggtgatgagcctcaacgagcactccatgcaggcgctgtcctggcgcaagctctacttgagccgcgccaagcttaaagcctccagccggacctcggctctgctctccggcttcgccatggtggcaatggtggaggtgcagctggacgctgaccacgactacccaccggggctgctcatcgccttcagtgcctgcaccacagtgctggtggctgtgcacctgtttgcgctcatgatcagcacctgcatcctgcccaacatcgaggcggtgagcaacgtgcacaatctcaactcggtcaaggagtccccccatgagcgcatgcaccgccacatcgagctggcctgggccttctccaccgtcatcggcacgctgctcttcctagctgaggtggtgctgctctgctgggtcaagttcttgcccctcaagaagcagccaggccagccaaggcccaccagcaagccccccgccagtggcgcagcagccaacgtcagcaccagcggcatcaccccgggccaggcagctgccatcgcctcgaccaccatcatggtgcccttcggcctgatctttatcgtcttcgccgtccacttctaccgctcactggttagccataagactgaccgacagttccaggagctcaacgagctggcggagtttgcccgcttacaggaccagctggaccacagaggggaccaccccctgacgcccggcagccactatgcctaggcccatgtggtctgggcccttccagtgctttggccttacgcccttccccttgaccttgtcctgccccagcctcacggacagcctgcgcagggggctgggcttcagcaaggggcagagcatggagggaagaggatttttataagagaaatttctgcactttgaaactgtcctctaagagaataagcatttcctgttcttccagctccaggtccacctcctgttgggaggcggtggggggccaaagtggggccacacactcgctgtgtcccctctcctcccctgtgccagtgccacctgggtgcctcctcctgtcctgtccgtctcaacctccctcccgtccagcattgagtgtgtacatgtgtgtgtgacacataaatatactcataaggacacctcc

SEQ ID NO: 166 - protein, 301 aa, Homo sapiens
MHPEPAPPPSRSSPELPPSGGSTTSGSRRSRRRSGDGEPPGAPPPPPSAVTYPDWIGQSYSEVMSLNEHSMQALSWRKLYLSRAKLKASSRTSALLSGFAMVAMVEVQLDADHDYPPGLLIAFSACTTVLVAVHLFALMISTCILPNIEAVSNVHNLNSVKESPHERMHRHIELAWAFSTVIGTLLFLAEVVLLCWVKFLPLKKQPGQPRPTSKPPASGAAANVSTSGITPGQAAAIASTTIMVPFGLIFIVFAVHFYRSLVSHKTDRQFQELNELAEFARLQDQLDHRGDHPLTPGSHYA

SEQ ID NO: 167 - DNA, 5883 bp, Homo sapiens
aggcagaagccggcggcgcgcggacagccagtcggcgccgcgcggagctggccgctggattggctgcaacactcgcgtgtcaggcggttgctaggctccggccgcgcgccccgcccttgcgctcagcgccctctcaccgcccggtacgtgctcgcgcgaaggctgcggcgcggcgctcgcgcctcttaggcttggcggtggcggcggcggcagcttcgcgccgaatccccggggagcggcggtggcggcgtcctggggccaggaggagcgaacacctgccgcggtcctcccgccggcgctgggcacacgactgtctatcccagatggctgcactggcctaggacagacggttcttcccccagtacgtcaagaccctggagggtgcaagctacagaacagctgggctcctgcattcctcccagaccctgtcttcagtaggacaacaggcaacaaacttaaatttgggtcaagcgattcccctgcctcagcttcctgagtagctgggattacagatagccctgggatctcctgaatttccaggttgggctactcaggcatggattgactcctacagttcaggcggatggagatcccaccaacccacagcttaattcttcagatgctttatcttcatttctcatgtatcttcagttggcttctaatgctctgtgtgctccgggatggagcaggtgtgcagagggtgagaacccagctctgggaccaagtcacttgcttccttacttagcaagactatcgacttgagcaaacttggacctgggatgaggatgtctgtgggcctctcgctgctgctgcccctctgggggaggacctttctcctcctgctctctgtggttatggctcagtcccactggcccagtgaaccctcagaggctgtcagggactgggaaaaccagcttgaggcatccatgcactcagtgctctcagacctccacgaggctgttcccacagtggttggcattcctgatggcacggctgtcgtcgggcgctcatttcgagtgaccattccaacagatttgattgcctccagtggagatatcatcaaggtatcagcggcagggaaggaggctttgccatcttggctgcactgggactcacagagccacaccctggagggcctcccccttgacactgataagggtgtgcattacatttcagtgagcgctacacggctgggggccaacgggagccacatcccccagacctccagtgtgttctccatcgaggtctaccctgaagaccacagtgagctgcagtcggtgaggacagcctccccagaccctggtgaggtggtatcatctgcctgtgctgcggatgaacctgtgactgttttgacggtgattttggatgccgacctcaccaagatgaccccaaagcaaaggattgacctcctgcacaggatgcggagcttctcagaagtagagcttcacaacatgaaattagtgccggtggtgaataacagactatttgacatgtcggccttcatggctggcccgggaaatgcaaaaaaggtggtggagaatggggcccttctctcctggaagctgggctgctccctgaaccagaacagtgtgcctgacattcatggtgtagaggcccctgccagggagggcgcaatgtctgctcagcttggctaccctgtggtgggttggcacatcgccaataagaagccccctcttcccaaacgcgtccggaggcagatccatgctacacccacacctgtcactgccattgggcccccaaccacggctatccaggagcccccatccaggatcgtgccaacccccacatctccagccattgctcctccaacagagaccatggctcctccagtcagggatcctgttcctgggaaacccacggtcaccatccggactcgaggcgccattattcaaaccccaaccctaggccccatccagcctactcgggtgtcagaagctggcaccacagttcctggccagattcgcccaacgatgaccattcctggctatgtggagcctactgcagttgctacccctcccacaaccaccaccaagaagccacgagtatccacaccaaaaccagcaacgccttcaactgactccaccaccaccacgactcgcaggccaaccaagaaaccacggacaccccggccagtgccccgggtcaccaccaaagtttccatcaccagattggaaactgcctcaccgcctactcgtattcgcaccaccaccagtggagtgccccgtggcggagaacccaaccagcgcccagagctcaagaaccatattgacagggtagatgcctgggttggcacctactttgaggtgaagatcccgtcagacactttctatgaccatgaggacaccaccactgacaagctgaagctgaccctgaaactgcgggagcagcagctggtgggcgagaagtcctgggtacagttcaacagcaacagccagctcatgtatggccttcccgacagcagccacgtgggcaaacacgagtatttcatgcatgccacagacaaggggggcctgtcggctgtggatgccttcgagatccacgtccacaggcgcccccaaggggatagggctcctgcaaggttcaaggccaagtttgtgggtgacccggcactggtgttgaatgacatccacaagaagattgccttggtaaagaaactggccttcgcctttggagaccgaaactgtagcaccatcaccctgcagaatatcacccggggctccatcgtggtggaatggaccaacaacacactgcccttggagccctgccccaaggagcagatcgctgggctgagccgccggatcgctgaggatgatggaaaacctcggcctgccttctccaacgccctagagcctgactttaaggccacaagcatcactgtgacgggctctggcagttgtcggcacctacagtttatccctgtggtaccacccaggagagtgccctcagaggcgccgcccacagaagtgcctgacagggaccctgagaagagcagtgaggatgatgtctacctgcacacagtcattccggccgtggtggtcgcagccatcctgctcattgctggcatcattgccatgatctgctaccgcaagaagcggaagggcaagcttacccttgaggaccaggccaccttcatcaagaagggggtgcctatcatctttgcagacgaactggacgactccaagcccccaccctcctccagcatgccactcattctgcaggaggagaaggctcccctaccccctcctgagtaccccaaccagagtgtgcccgagaccactcctctgaaccaggacaccatgggagagtacacgcccctgcgggatgaggatcccaatgcgcctccctaccagcccccaccgcccttcacagcacccatggagggcaagggctcccgtcccaagaacatgaccccataccggtcacctcctccctatgtcccaccttaacccgcaagcgcctgggtggaggcagggtagggcaggggcctggagacgacatggtgttgtctgtggagaccggtggcctgcagaccattgcccaccgggagccgacacctgacctagcacacactgacacaggggcctggacaagcccgccctctctggtcctcccaaaccccaaagcagctggagagactttggggacttttttatttttattttttgcctaacagcttttggtttgttcatagagaattcttcgcttcatttttgatggctggctctgaaagcaccatgtggagtggaggtggagggagcgaggaaccatgaatgaactcgcaggcagtgccgggcggccccctggctctctgcgttttgcctttaacactaactgtactgttttttctattcacgtgtgtctagctgcaggatgtaacatggaaaacagtaactaaagattaaattcaaaggactttcagaagttaaggttaagtttttacgtttaatctgctgtttacctaaacttgtatgtataatttttgggtgggtatggggaattgctttgctaaaaataagctcccagggtgtttcaaacttagagaagaccaagggacagtattttttatcaaaggaatactattttttcacactacgtcaacttggttgctctgataccccagagcctgattgggggcctcccggccctggctcacgccaagtccctggtgctgggtttgctctcccgctgttgccaggggctggaagctggaggggtctcttgggccatggacatccccacttccagcccatgtacactagtggcccacgaccaaggggtcttcatttccatgaaaaagggactccaagaggcagtggtggctgtggcccccaactttggtgctccagggtgggccagctgcttgtgggggcacctgggaggtcaaaggtctccaccacatcaacctattttgttttaccctttttctgtgcattgtttttttttttcctcctaaaaggaatatcacggttttttgaaacactcagtgggggacattttggtgaagatgcaatatttttatgtcatgtgatgctctttcctcacttgaccttggccgctttgtcctaacagtccacagtcctgccccgacccaccccatcccttttctctggcactccagtcccaggccttgggcctgaactactggaaaaggtctggcggctggggaggagtgccagcaatagttcataataaaaatctgttagctctcaaagctaattttttactaaagtttttatacagcctcaaattgttttattaaaaaaaagatttaaaatggtgatgcttacagcagtttgtacgagctcttaagtgttgattccatggaactgacggctttgcttgttttgattcttttccccctacttttcctaatggtttaaattctggaattacactggggttcttttgccttttttagcagaacatccgtccgtccatctgcatctctgtcccatgactcaggggcgcccactctgcttcgattctcctcctgtggaagaaaccattttgagcatgacttttcttgatgtctgaagcgttattttgggtactttttagggaggaatgcctttcgcaataatgtatccattccctgattgagggtgggtgggtggacccaggctccctttgcacacagagcagctacttctaagccatatcgactgttttgcagaggatttgtgtgtgctgcctcaggaggggagggctggtaggagggggggagaggtctctgtcctactgctctccagagggcatttccccttgcgccttctcccacagggcccagcccctctcccctgccccagtccccagggggtactctggagtgagcagtgcccctgtgggggagcctgtaaatgcgggctcagtggaccactggtgactgggctcatgcctccaagtcagagtttccctggtgccccagagacaggagcacaagtgggatctgacctggtgagattatttctgatgacctcatcaaaaaataaacaattcccaatgttccaggtgagggctttgaaaggccttccaaacagctccgtcgcccctagcaactccaccattgggcactgccatgcagagacgtggctggcccagaatggcctgttgccatagcaactggaggcgatggggcagtgaacagaataacaacagcaacaatgcctttgcaggcagcctgctcccctgagcgctgggctggtgatggtcgttggactctgtgagatggagagccaatctcacattcaagtgttcaccaaccactgatgtgtttttatttccttctatatgattttaagatgtgttttctgcattctgtaaagaaacatatcaaactaaataaaagcagtgtctttattacaa

SEQ ID NO: 168 - protein, 895 aa, Homo sapiens
MRMSVGLSLLLPLSGRTFLLLLSVVMAQSHWPSEPSEAVRDWENQLEASMHSVLSDLHEAVPTVVGIPDGTAVVGRSFRVTIPTDLIASSGDIIKVSAAGKEALPSWLHWDSQSHTLEGLPLDTDKGVHYISVSATRLGANGSHIPQTSSVFSIEVYPEDHSELQSVRTASPDPGEVVSSACAADEPVTVLTVILDADLTKMTPKQRIDLLHRMRSFSEVELHNMKLVPVVNNRLFDMSAFMAGPGNAKKVVENGALLSWKLGCSLNQNSVPDIHGVEAPAREGAMSAQLGYPVVGWHIANKKPPLPKRVRRQIHATPTPVTAIGPPTTAIQEPPSRIVPTPTSPAIAPPTETMAPPVRDPVPGKPTVTIRTRGAIIQTPTLGPIQPTRVSEAGTTVPGQIRPTMTIPGYVEPTAVATPPTTTTKKPRVSTPKPATPSTDSTTTTTRRPTKKPRTPRPVPRVTTKVSITRLETASPPTRIRTTTSGVPRGGEPNQRPELKNHIDRVDAWVGTYFEVKIPSDTFYDHEDTTTDKLKLTLKLREQQLVGEKSWVQFNSNSQLMYGLPDSSHVGKHEYFMHATDKGGLSAVDAFEIHVHRRPQGDRAPARFKAKFVGDPALVLNDIHKKIALVKKLAFAFGDRNCSTITLQNITRGSIVVEWTNNTLPLEPCPKEQIAGLSRRIAEDDGKPRPAFSNALEPDFKATSITVTGSGSCRHLQFIPVVPPRRVPSEAPPTEVPDRDPEKSSEDDVYLHTVIPAVVVAAILLIAGIIAMICYRKKRKGKLTLEDQATFIKKGVPIIFADELDDSKPPPSSSMPLILQEEKAPLPPPEYPNQSVPETTPLNQDTMGEYTPLRDEDPNAPPYQPPPPFTAPMEGKGSRPKNMTPYRSPPPYVPP

SEQ ID NO: 169 - DNA, 1526 bp, Homo sapiens
ggcgattatagagatagttaatgtcggccgtataagaaacattattaaagttactcttcggtcctttccgttcttgataaacaattcctgcgccttcctctcgaattctattttccattcctcaagtcactttaatggctcttcaatacaacaaatatttactgagtgcttactaagtgccaggcactgggctcagcgctgtgagggatgagaaagaagtggtaccttccttccaggcgattgtagtctagactacaaactgccttcctctgccaggacaagtttgtcgtctgctctgagctatcaagccccttaggagacctaggacccagctgggtcccatccctttggagtagctgcttcagactagcctaggaagcacctaattcttgtgggcaaaggagccatggaagatagagctggtgagcaagagcaggagagacacagccttcgtctggaaaagctacaacactgggcaaggcacaggcagagtgggcacctcttggtgctagcggtgagccagctatggctggcagtggttgtggtgccccttgctgtctcagtcgcctgcctgaactctgattgtcacatggccacagcgctgcctcttgggcctggagcctcaggtctcctcactgggactgtcactctggagcttcgcagagcaccccgcctttggaaggtgcgggccatgatgatattcaacaccttcaacttgatcttgggtttcatagtggtggtggtcgaggtgatgaagacagccttggggcctgccccaactgcctcctcccagcatgctggcttgctggtgctggaactcagtgctgaggccttcaccctagggggagtgctggtctcagtgcacgccctattcttgctgagccagaggaaaccaggatgctgcaggagccagagtctgcactatcaagagctgcaggagggcttctctgagttggaagaggttcctggtttggagaatggtcccacggtggccagcacaggagcaaatgagagggtgggacagcgggaacagacacgtgctgctctccttccaccctgagagaatgctctccagacattcctgcatcccaccccaccaaactcagaagcttgctgggatccttcgagtccaataggaagtccgggagtgccttcagttttcactcaaagcaggcccttttttcgttccttccctgttaggggaagatacacctggacgagaatatatcctcacctcaccaccctgaaaagctgctttctcccttgcatccatatcctctcttcctgtcacctccccatacagcttcacatttgcctcatcgcacttttcttttctgtccacctttcataatcccatccactccaaatcccggaccctgcacacgccaactccctgaatccaattcaggagtgccccagttcccctttcgatccatctcctttctactgtagcggagactacaagtcccaggatgccccgctagcccgtgaccggctaggaaataaagagccttctctccgcggta

SEQ ID NO: 170 - protein, 217 aa, Homo sapiens
MEDRAGEQEQERHSLRLEKLQHWARHRQSGHLLVLAVSQLWLAVVVVPLAVSVACLNSDCHMATALPLGPGASGLLTGTVTLELRRAPRLWKVRAMMIFNTFNLILGFIVVVVEVMKTALGPAPTASSQHAGLLVLELSAEAFTLGGVLVSVHALFLLSQRKPGCCRSQSLHYQELQEGFSELEEVPGLENGPTVASTGANERVGQREQTRAALLPP

SEQ ID NO: 171 - DNA, 5026 bp, Homo sapiens
agcgagggccggagtggggctgaggcttcggtgcagagctggagagccgcggctgggaccggagtggggagcgcggcgtggaggtgccacccggcgcgggtggcggagagatcagaagcctcttccccaagccgagccaacctcagcggggacccgggctcagggacgcggcggcggcggcggcgactgcagtggctggacgatggcagcgtccgccggagccggggcggtgattgcagccccagacagccggcgctggctgtggtcggtgctggcggcggcgcttgggctcttgacagctggagtatcagccttggaagtatatacgccaaaagaaatcttcgtggcaaatggtacacaagggaagctgacctgcaagttcaagtctactagtacgactggcgggttgacctcagtctcctggagcttccagccagagggggccgacactactgtgtcgtttttccactactcccaagggcaagtgtaccttgggaattatccaccatttaaagacagaatcagctgggctggagaccttgacaagaaagatgcatcaatcaacatagaaaatatgcagtttatacacaatggcacctatatctgtgatgtcaaaaaccctcctgacatcgttgtccagcctggacacattaggctctatgtcgtagaaaaagagaatttgcctgtgtttccagtttgggtagtggtgggcatagttactgctgtggtcctaggtctcactctgctcatcagcatgattctggctgtcctctatagaaggaaaaactctaaacgggattacactggctgcagtacatcagagagtttgtcaccagttaagcaggctcctcggaagtccccctccgacactgagggtcttgtaaagagtctgccttctggatctcaccagggcccagtcatatatgcacagttagaccactccggcggacatcacagtgacaagattaacaagtcagagtctgtggtgtatgcggatatccgaaagaattaagagaatacctagaacatatcctcagcaagaaacaaaaccaaactggactctcgtgcagaaaatgtagcccattaccacatgtagccttggagacccaggcaaggacaagtacacgtgtactcacagagggagagaaagatgtgtacaaaggatatgtataaatattctatttagtcatcctgatatgaggagccagtgttgcatgatgaaaagatggtatgattctacatatgtacccattgtcttgctgtttttgtactttcttttcaggtcatttacaattgggagatttcagaaacattcctttcaccatcatttagaaatggtttgccttaatggagacaatagcagatcctgtagtatttccagtagacatggccttttaatctaagggcttaagactgattagtcttagcatttactgtagttggaggatggagatgctatgatggaagcatacccagggtggcctttagcacagtatcagtaccatttatttgtctgccgcttttaaaaaatacccattggctatgccacttgaaaacaatttgagaagtttttttgaagtttttctcactaaaatatggggcaattgttagccttacatgttgtgtagacttactttaagtttgcacccttgaaatgtgtcatatcaatttctggattcataatagcaagattagcaaaggataaatgccgaaggtcacttcattctggacacagttggatcaatactgattaagtagaaaatccaagctttgcttgagaacttttgtaacgtggagagtaaaaagtatcggttttattctttgctgatgtcctttctgcttgaaataacagtcaccatacagctaaaggagaggagtttctttccttctaagtaggcagaaatggtatcattatgttgccgctctccaatctcccagagctcgctctctagagaatcaccttctttcgcttttttttttttttttgaggtagagtctcactatgttgcccagactagccttgaactcttgggctcaagtgattctccctcctcagcctcccgagtagctggaacgaactatagttgcaccactgcagctggcaagaatcaccttctttataaagcgtcagtcatgcttccagcaagaggcagcatcagtcatggctttataacagcttcatggtgcctcaaagactgttgaggttaatgagagcctagattagacagtttggctgtccttccctaaaacttgttttctcctattcactactccccaccgcacttaaaatctatgagtttttactttttactgggaatggaaagtgtggtgaagatcattcaacacttatgttgtcatttctcccattttctgaatttttttttaaatttccccccttttaaaattgttcgaaagcccacagttatggaaagaattactgtctagatggtctgcagaacgtgtttggggtgagtgggagtgaggggcaatgttactttttctccctgtagtttggagtccattatgagctgctgctttttcttctcatcttgtcatcttctggggatgtttgaaggctgagttccaacagaattcacaaagggaataaaacaggattgagattttgaggtgtgcacaaggtggtaagataaagggcatatgagcttcaaaactaatgctgttgcatacatgaagccttttgttttttgaggagctatttttgttattcttgtaacgctccaccttacatgccacatctgtgtgagtcaacagggatcaggtttggtcaccacacatgtctgaagctgggcagcgtctgctctgtgttctgtgtggaatggagaaaaaaacgcctgccctgctgccttccatgttcataggcccagcccaagagagtgacacacagtgctggccctgagacatttccacaaagtggtcaactctgccttgcatcctaaaactttttgggcatctattttgaaaactataggagcctttggaaggcctcttatgtttggaggggaagggtgttgagattgtcaccatccttcaagctgagactcctggtgagcctttgccaccatgaaaaccacatagctgaccagggctgtgcttgaggtacagaggacacacattgtagacaggcctgtgtcatgtttccttacagtcgttttttacagagaaaaggggcattgttttttcactgctttctcaacagttcctgtgaataaatgaaacatttcggagctccctgagagcaagagccttcacttcttcttgcggtgccgggaccatgtgttggtgaagctggtgctgtgggggccactcactcgaatgacacctggaggcctgttcctcccttaccactcccttccccagcccgacttcttggcctcctgcccaaccagacacctcaaactctgtcagtgccctggcattctggcagagaatcctcaccagttctcaccaaccttccccccaggcaagggcagctgccagcatggtgctctgccaggacaggtttccctgaaggaagctgctcacactgagatgagcctctcagggcaggacctcttcccaagccctgcacacccacccctgcagcccttttggctccccttttccctgtgcctcagcactcctttcctggttgcagataacgaactaaggttgcctaaagggcagatctgccctctccatgtcttcgtcctggcaaacagggtcgtcttaaaattatgcgctaattctgtatgggagcactcaaaaggcattacttagagattgaaatttcaaactatctctagtttttcaatggaaatatatcagctagggaaaaaccatcaagctcattattattttttgatcttcagttgtatttttgtgaatattttaatacatctttttcaatttctgaattgtgttgtgtgctcattttgaccagaatagaaaaagagatatgcctttcactcatatcattccagctacacctgccttcttttcttcaaaaatgccgtccgtgtgcctgcttctgggcctttgcacatgctgttccctgggcctgaagcatgccttctgccaatattcctgtggtttgctctctgacttcctttaagcctctgctcaaatgttacctcctcagggagaccttctgtgatatataaaagagcaagccccccaccccaccgcctcagccttcctggccccctcagttctgctctagttactctatttctctccctctttcccagtacacacttgtctgttctcccgcattagaacatagttaacaagagaccagaaccttgctgttttgttcactgctccgtctgcagtaaagggaacagcacctggcacttagctgctcaatacatgttacgtggatggatgagtaggtggaagcattcatccattcagcaacctacactgagaacaatcctgtgccaagcactgtgctaagcataaggaaacaaaacaagacaaagctcctcaaggagcttgccacagggtggaggtgacaggtgacatgaatggaagtaactagtagttaccaaatacttggtgtgagccaggcactttgcatttctttctctattatttctgtgagttaacagtaattgtactaatcttaatcccattgtttgaaagattatatggcttacccagggccacttagctaataaaggaacagagaagaggggctgggcctggggccgctgtttgatccacagccttgttcctaaccactatgccctgtggcctctcacaccaaaaggaagtaccaaactgcttccttactcaaataaatgtgctgaaatgcagttgcagttttctcccagtcccttaggagctggttagagagtcccttaggaacttgagagggtagtgtagtctaggtggtaggcacagatgtctgagagctttaacctcagtctggaagacaatgtggtgacttaatttgttgagaactatgttacaaataatgtgttactaataaaacattgaggcttcgcaaaaaaaaaaaaaaaaa

SEQ ID NO: 172 - protein, 269 aa, Homo sapiens
MAASAGAGAVIAAPDSRRWLWSVLAAALGLLTAGVSALEVYTPKEIFVANGTQGKLTCKFKSTSTTGGLTSVSWSFQPEGADTTVSFFHYSQGQVYLGNYPPFKDRISWAGDLDKKDASINIENMQFIHNGTYICDVKNPPDIVVQPGHIRLYVVEKENLPVFPVWVVVGIVTAVVLGLTLLISMILAVLYRRKNSKRDYTGCSTSESLSPVKQAPRKSPSDTEGLVKSLPSGSHQGPVIYAQLDHSGGHHSDKINKSESVVYADIRKN

SEQ ID NO: 173 - DNA, 731 bp, Homo sapiens
ccactccgaattgaaccagtcttcaaagtaaaggcaatggcattttatcccttgcaaattgctgggctggttcttgggttccttggcatggtggggactcttgccacaacccttctgcctcagtggagagtatcagcttttgttggcagcaacattattgtctttgagaggctctgggaagggctctggatgaattgcatccgacaagccagggtccggttgcaatgcaagttctatagctccttgttggctctcccgcctgccctggaaacagcccgggccctcatgtgtgtggctgttgctctctccttgatcgccctgcttattggcatctgtggcatgaagcaggtccagtgcacaggctctaacgagagggccaaagcataccttctgggaacttcaggagtcctcttcatcctgacgggcatcttcgttctgattccggtgagctggacagccaatataatcatcagagatttctacaacccagccatccacataggtcagaaacgagagctgggagcagcacttttccttggctgggcaagcgctgctgtcctcttcattggagggggtctgctttgtggattttgctgctgcaacagaaagaagcaagggtacagatatccagtgcctggctaccgtgtgccacacacagataagcgaagaaatacgacaatgcttagtaagacctccaccagttatgtctaatgcctccttttggctccaag

SEQ ID NO: 174 - protein, 224 aa, Homo sapiens
MAFYPLQIAGLVLGFLGMVGTLATTLLPQWRVSAFVGSNIIVFERLWEGLWMNCIRQARVRLQCKFYSSLLALPPALETARALMCVAVALSLIALLIGICGMKQVQCTGSNERAKAYLLGTSGVLFILTGIFVLIPVSWTANIIIRDFYNPAIHIGQKRELGAALFLGWASAAVLFIGGGLLCGFCCCNRKKQGYRYPVPGYRVPHTDKRRNTTMLSKTSTSYV

SEQ ID NO: 175 - DNA, 4576 bp, Homo sapiens
cggcagaggaggaggaggaggcggtgctcgcgccgggcggtagagcggcgctgggacccatgcggccgtgacccccggctccctagaggcccagcgcagccgcagcggacaaaggagcatgtccgcgccggggaaggcccgtcctccggccgccataaggctccggtcgccgctgggcccgcgccgcgctcctgcccgcccgggctccggggcggcccgctaggccagtgcgccgccgctcgccccgcaggccccggcccgcagcatggagccacccggacgccggcggggccgcgcgcagccgccgctgttgctgccgctctcgctgttagcgctgctcgcgctgctgggaggcggcggcggcggcggcgccgcggcgctgcccgccggctgcaagcacgatgggcggccccgaggggctggcagggcggcgggcgccgccgagggcaaggtggtgtgcagcagcctggaactcgcgcaggtcctgcccccagatactctgcccaaccgcacggtcaccctgattctgagtaacaataagatatccgagctgaagaatggctcattttctgggttaagtctccttgaaagattggacctccgaaacaatcttattagtagtatagatccaggtgccttctggggactgtcatctctaaaaagattggatctgacaaacaatcgaataggatgtctgaatgcagacatatttcgaggactcaccaatctggttcggctaaacctttcggggaatttgttttcttcattatctcaaggaacttttgattatcttgcgtcattacggtctttggaattccagactgagtatcttttgtgtgactgtaacatactgtggatgcatcgctgggtaaaggagaagaacatcacggtacgggataccaggtgtgtttatcctaagtcactgcaggcccaaccagtcacaggcgtgaagcaggagctgttgacatgcgaccctccgcttgaattgccgtctttctacatgactccatctcatcgccaagttgtgtttgaaggagacagccttcctttccagtgcatggcttcatatattgatcaggacatgcaagtgttgtggtatcaggatgggagaatagttgaaaccgatgaatcgcaaggtatttttgttgaaaagaacatgattcacaactgctccttgattgcaagtgccctaaccatttctaatattcaggctggatctactggaaattggggctgtcatgtccagaccaaacgtgggaataatacgaggactgtggatattgtggtattagagagttctgcacagtactgtcctccagagagggtggtaaacaacaaaggtgacttcagatggcccagaacattggcaggcattactgcatatctgcagtgtacgcggaacacccatggcagtgggatatatcccggaaacccacaggatgagagaaaagcttggcgcagatgtgatagaggtggcttttgggcagatgatgattattctcgctgtcagtatgcaaatgatgtcactagagttctttatatgtttaatcagatgcccctcaatcttaccaatgccgtggcaacagctcgacagttactggcttacactgtggaagcagccaacttttctgacaaaatggatgttatatttgtggcagaaatgattgaaaaatttggaagatttaccaaggaggaaaaatcaaaagagctaggtgacgtgatggttgacattgcaagtaacatcatgttggctgatgaacgtgtcctgtggctggcgcagagggaagctaaagcctgcagtaggattgtgcagtgtcttcagcgcattgctacctaccggctagccggtggagctcacgtttattcaacatattcacccaatattgctctggaagcttatgtcatcaagtctactggcttcacggggatgacctgtaccgtgttccagaaagtggcagcctctgatcgtacaggactttcggattatgggaggcgggatccagagggaaacctggataagcagctgagctttaagtgcaatgtttcaaatacattttcgagtctggcactaaagaatactattgtggaggcttctattcagcttcctccttcccttttctcaccaaagcaaaaaagagaactcagaccaactgatgactctctttacaagcttcaactcattgcattccgcaatggaaagctttttccagccactggaaattcaacaaatttggctgatgatggaaaacgacgtactgtggttacccctgtgattctcaccaaaatagatggtgtgaatgtagatacccaccacatccctgttaatgtgacactgcgtcgaattgcacatggagcagatgctgttgcagcccggtgggatttcgatttgctgaacggacaaggaggctggaagtcagatgggtgccatatactctattcagatgaaaatatcactacgattcagtgctactcccttagtaactatgcagttttaatggatttgacgggatctgaactatacacccaggcggccagcctcctgcatcctgtggtttatactaccgctatcattctcctcttatgtctcttagccgtcattgtcagttacatataccatcacagtttgattagaatcagcctcaagagctggcacatgcttgtgaacttgtgctttcatattttcctaacctgtgtggtctttgtgggaggaataacccagactaggaatgccagcatctgccaagcagttgggataattcttcactattccacccttgccacagtactatgggtaggagtgacagctcgaaatatctacaaacaagtcactaaaaaagctaaaagatgccaggatcctgatgaaccaccacctccaccaagaccaatgctcagattttacctgattggtggtggtatccccatcattgtttgcggcataactgcagcagcgaacattaagaattacggcagtcggccaaacgcaccctattgctggatggcatgggaaccctccttgggagccttctatgggccagccagcttcatcacttttgtaaactgcatgtactttctgagcatatttattcagttgaaaagacaccctgagcgcaaatatgagcttaaggagcccacggaggagcaacagagattggcagccaatgaaaatggcgaaataaatcatcaggattcaatgtctttgtctctgatttctacatcagccttggaaaatgagcacacttttcattctcagctcttgggggccagccttactttgctcttatatgttgcactgtggatgtttggggctttggctgtttctttgtattaccctttggacttggtttttagcttcgtttttggagccacaagtttaagcttcagtgcgttcttcgtggtccaccattgtgttaatagggaggatgttagacttgcgtggatcatgacttgctgcccaggacggagctcgtattcagtgcaagtcaacgtccagccccccaactctaatgggacgaatggagaggcacccaaatgccccaatagcagtgcggagtcttcatgcacaaacaaaagtgcttcaagcttcaaaaattcctcccagggctgcaaattaacaaacttgcaggcggctgcagctcagtgccatgccaattctttacctttgaactccacccctcagcttgataatagtctgacagaacattcaatggacaatgatattaaaatgcacgtggcgcctttagaagttcagtttcgaacaaatgtgcactcaagccgccaccataaaaacagaagtaaaggacaccgggcaagccgactcacagtcctgagagaatatgcctacgatgtcccaacgagcgtggaaggaagcgtgcagaacggcttacctaaaagccggctgggcaataacgaaggacactcgaggagccgaagagcttatttagcctacagagagagacagtacaacccaccccagcaagacagcagcgatgcttgtagcacacttcccaaaagtagcagaaattttgaaaagccagtttcaaccactagtaaaaaagatgcgttaaggaagccagctgtggttgaacttgaaaatcagcaaaaatcttatggcctcaacttggccattcagaatggaccaattaaaagcaatgggcaggagggacccttgctcggtaccgatagcactggcaatgttaggactggattatggaaacacgaaactactgtgtaacattgctgggcttcctaggcagaaattcatataaactgtgatactcacattccttgaagctatgagcatttaaaaactgtttacagccaccatagggattcaaaagaatttggaataaactttgaagttttggattttacttatttttatccccaaattgttgctattttttaggatctgaaacaaaatctttctaaaacattgttttagttgtcaaagcaccaacaggacattttgggatgtgaaatgtaatttcttggaatctgtaatttgtacttaatatttcaggcttgtatttaatataataaataggtgtttgttattgtgtcaaaaaaaaaaaaaaaa

SEQ ID NO: 176 - protein, 1321 aa, Homo sapiens
MEPPGRRRGRAQPPLLLPLSLLALLALLGGGGGGGAAALPAGCKHDGRPRGAGRAAGAAEGKVVCSSLELAQVLPPDTLPNRTVTLILSNNKISELKNGSFSGLSLLERLDLRNNLISSIDPGAFWGLSSLKRLDLTNNRIGCLNADIFRGLTNLVRLNLSGNLFSSLSQGTFDYLASLRSLEFQTEYLLCDCNILWMHRWVKEKNITVRDTRCVYPKSLQAQPVTGVKQELLTCDPPLELPSFYMTPSHRQVVFEGDSLPFQCMASYIDQDMQVLWYQDGRIVETDESQGIFVEKNMIHNCSLIASALTISNIQAGSTGNWGCHVQTKRGNNTRTVDIVVLESSAQYCPPERVVNNKGDFRWPRTLAGITAYLQCTRNTHGSGIYPGNPQDERKAWRRCDRGGFWADDDYSRCQYANDVTRVLYMFNQMPLNLTNAVATARQLLAYTVEAANFSDKMDVIFVAEMIEKFGRFTKEEKSKELGDVMVDIASNIMLADERVLWLAQREAKACSRIVQCLQRIATYRLAGGAHVYSTYSPNIALEAYVIKSTGFTGMTCTVFQKVAASDRTGLSDYGRRDPEGNLDKQLSFKCNVSNTFSSLALKNTIVEASIQLPPSLFSPKQKRELRPTDDSLYKLQLIAFRNGKLFPATGNSTNLADDGKRRTVVTPVILTKIDGVNVDTHHIPVNVTLRRIAHGADAVAARWDFDLLNGQGGWKSDGCHILYSDENITTIQCYSLSNYAVLMDLTGSELYTQAASLLHPVVYTTAIILLLCLLAVIVSYIYHHSLIRISLKSWHMLVNLCFHIFLTCVVFVGGITQTRNASICQAVGIILHYSTLATVLWVGVTARNIYKQVTKKAKRCQDPDEPPPPPRPMLRFYLIGGGIPIIVCGITAAANIKNYGSRPNAPYCWMAWEPSLGAFYGPASFITFVNCMYFLSIFIQLKRHPERKYELKEPTEEQQRLAANENGEINHQDSMSLSLISTSALENEHTFHSQLLGASLTLLLYVALWMFGALAVSLYYPLDLVFSFVFGATSLSFSAFFVVHHCVNREDVRLAWIMTCCPGRSSYSVQVNVQPPNSNGTNGEAPKCPNSSAESSCTNKSASSFKNSSQGCKLTNLQAAAAQCHANSLPLNSTPQLDNSLTEHSMDNDIKMHVAPLEVQFRTNVHSSRHHKNRSKGHRASRLTVLREYAYDVPTSVEGSVQNGLPKSRLGNNEGHSRSRRAYLAYRERQYNPPQQDSSDACSTLPKSSRNFEKPVSTTSKKDALRKPAVVELENQQKSYGLNLAIQNGPIKSNGQEGPLLGTDSTGNVRTGLWKHETTV

SEQ ID NO: 177 - DNA, 2944 bp, Homo sapiens
cgcctggaaacacgaacttccggtctcttaggctccgggccacagagacggtgtcagtggtagcctagagaggccgctaacagacaggagccgaacgggggcttccgctcagcagagaggcaagatggctacggcagggggtggctctggggctgacccgggaagtcggggtctccttcgccttctgtctttctgcgtcctactagcaggtttgtgcaggggaaactcagtggagaggaagatatatatccccttaaataaaacagctccctgtgttcgcctgctcaacgccactcatcagattggctgccagtcttcaattagtggagacacaggggttatccacgtagtagagaaagaggaggacctacagtgggtattgactgatggccccaaccccccttacatggttctgctggagagcaagcattttaccagggatttaatggagaagctgaaagggagaaccagccgaattgctggtcttgcagtgtccttgaccaagcccagtcctgcctcaggcttctctcctagtgtacagtgcccaaatgatgggtttggtgtttactccaattcctatgggccagagtttgctcactgcagagaaatacagtggaattcgctgggcaatggtttggcttatgaagactttagtttccccatctttcttcttgaagatgaaaatgaaaccaaagtcatcaagcagtgctatcaagatcacaacctgagtcagaatggctcagcaccaaccttcccactatgtgccatgcagctcttttcacacatgcatgctgtcatcagcactgccacctgcatgcggcgcagctccatccaaagcaccttcagcatcaacccagaaatcgtctgtgaccccctgtctgattacaatgtgtggagcatgctaaagcctataaatacaactgggacattaaagcctgacgacagggttgtggttgctgccacccggctggatagtcgttcctttttctggaatgtggccccaggggctgaaagcgcagtggcttcctttgtcacccagctggctgctgctgaagctttgcaaaaggcacctgatgtgaccaccctgccccgcaatgtcatgtttgtcttctttcaaggggaaacttttgactacattggcagctcgaggatggtctacgatatggagaagggcaagtttcccgtgcagttagagaatgttgactcatttgtggagctgggacaggtggccttaagaacttcattagagctttggatgcacacagatcctgtttctcagaaaaatgagtctgtacggaaccaggtggaggatctcctggccacattggagaagagtggtgctggtgtccctgctgtcatcctcaggaggccaaatcagtcccagcctctcccaccatcttccctgcagcgatttcttcgagctcgaaacatctctggcgttgttctggctgaccactctggtgccttccataacaaatattaccagagtatttacgacactgctgagaacattaatgtgagctatcccgaatggctgagccctgaagaggacctgaactttgtaacagacactgccaaggccctggcagatgtggccacggtgctgggacgtgctctgtatgagcttgcaggaggaaccaacttcagcgacacagttcaggctgatccccaaacggttacccgcctgctctatgggttcctgattaaagccaacaactcatggttccagtctatcctcaggcaggacctaaggtcctacttgggtgacgggcctcttcaacattacatcgctgtctccagccccaccaacaccacttatgttgtacagtatgccttggcaaatttgactggcacagtggtcaacctcacccgagagcagtgccaggatccaagtaaagtcccaagtgaaaacaaggatctgtatgagtactcatgggtccagggccctttgcattctaatgagacggaccgactcccccggtgtgtgcgttctactgcacgattagccagggccttgtctcctgcctttgaactgagtcagtggagctctactgaatactctacatggactgagagccgctggaaagatatccgtgcccggatatttctcatcgccagcaaagagcttgagttgatcaccctgacagtgggcttcggcatcctcatcttctccctcatcgtcacctactgcatcaatgccaaagctgatgtccttttcattgctccccgggagccaggagctgtgtcatactgaggaggaccccagcttttcttgccagctcagcagttcacttcctagagcatctgtcccactgggacacaaccactaatttgtcactggaacctccctgggcctgtctcagattgggattaacataaaagagtggaactatccaaaagagacagggagaaataaataaattgcctcccttcctccgctcccctttcccatcaccccttccccatttcctcttccttctctactcatgccagattttgggattacaaatagaagcttcttgctcctgtttaactccctagttacccaccctaatttgcccttcaggacccttctactttttccttcctgccctgtacctctctctgctcctcacccccacccctgtacccagccaccttcctgactgggaaggacataaaaggtttaatgtcagggtcaaactacattgagcccctgaggacaggggcatctctgggctgagcctactgtctccttcccactgtcctttctccaggccctcagatggcacattagggtgggcgtgctgcgggtgggtatcccacctccagcccacagtgctcagttgtactttttattaagctgtaatatctatttttgtttttgtctttttcctttattctttttgtaaatatatatataatgagtttcattaaaatagattatcccacacgaaaaaaaaaa

SEQ ID NO: 178 - protein, 709 aa, Homo sapiens
MATAGGGSGADPGSRGLLRLLSFCVLLAGLCRGNSVERKIYIPLNKTAPCVRLLNATHQIGCQSSISGDTGVIHVVEKEEDLQWVLTDGPNPPYMVLLESKHFTRDLMEKLKGRTSRIAGLAVSLTKPSPASGFSPSVQCPNDGFGVYSNSYGPEFAHCREIQWNSLGNGLAYEDFSFPIFLLEDENETKVIKQCYQDHNLSQNGSAPTFPLCAMQLFSHMHAVISTATCMRRSSIQSTFSINPEIVCDPLSDYNVWSMLKPINTTGTLKPDDRVVVAATRLDSRSFFWNVAPGAESAVASFVTQLAAAEALQKAPDVTTLPRNVMFVFFQGETFDYIGSSRMVYDMEKGKFPVQLENVDSFVELGQVALRTSLELWMHTDPVSQKNESVRNQVEDLLATLEKSGAGVPAVILRRPNQSQPLPPSSLQRFLRARNISGVVLADHSGAFHNKYYQSIYDTAENINVSYPEWLSPEEDLNFVTDTAKALADVATVLGRALYELAGGTNFSDTVQADPQTVTRLLYGFLIKANNSWFQSILRQDLRSYLGDGPLQHYIAVSSPTNTTYVVQYALANLTGTVVNLTREQCQDPSKVPSENKDLYEYSWVQGPLHSNETDRLPRCVRSTARLARALSPAFELSQWSSTEYSTWTESRWKDIRARIFLIASKELELITLTVGFGILIFSLIVTYCINAKADVLFIAPREPGAVSY

SEQ ID NO: 179 - DNA, 1223 bp, Homo sapiens
atggcgtctgcggcagcagcggaggccgagaagggatctccagttgtggtgggcctgctagttgtgggcaatatcattattctgctgtcaggcctgtccctgtttgctgagaccatatgggtgacagccgaccagtaccgtgtatacccactgatgggagtctcaggcaaggatgacgtcttcgctggtgcctggattgccatcttctgcggcttctccttcttcatggtagccagttttggtgtgggtgccgcactctgccgccgccggtccatggtcctcacgtacctggtgctcatgctcatcgtctacatcttcgagtgcgcctcctgcatcacgtcctacacccaccgtgactacatggtgtccaacccatccctgatcaccaagcagatgctgaccttctacagcgcggacaccgaccagggccaggagctgacccgcctctgggaccgcgtcatgattgagcaagaatgctgtggcacatctggtcccatggactgggtgaacttcacgtcagccttccgggcggccactccggaggtggtgttcccctggcccccactgtgctgtcgccggacgggaaacttcatccccctcaacgaggagggctgccgcctggggcacatggactacctgttcaccaagggctgcttcgaacacatcggccacgccatcgacagctacacgtggggtatctcgtggtttgggtttgccatcctgatgtggacgctcccggtcatgctgatagccatgtatttctacaccatgctctgagggacaggaggggaaggcaacatacacaccccggactcctccgcatcctcctcctgcttcctccgctgggcctggatggctgcctcacctctcacctcccaacgtccctagcccttacgtccttccacttccaagatctttttccaggttcctgagccctactgtgtctcaggtgtgccctgaaaccccagggcttgtgtgcacatatccttagcccatctttcaagggacctctccatgatcccacctcccattcacagatacctctcttgtagctctctgacctcctccttcatggcaggcatcgccattcttgctgaaccgtttgtgattgccatttgagctctggaagcctctattgccatgagagttctgtcacggtcactttactgtccccatcatcacccagcacggggctaagcatatactagatagtcaataaataa

SEQ ID NO: 180 - protein, 258 aa, Homo sapiens
MASAAAAEAEKGSPVVVGLLVVGNIIILLSGLSLFAETIWVTADQYRVYPLMGVSGKDDVFAGAWIAIFCGFSFFMVASFGVGAALCRRRSMVLTYLVLMLIVYIFECASCITSYTHRDYMVSNPSLITKQMLTFYSADTDQGQELTRLWDRVMIEQECCGTSGPMDWVNFTSAFRAATPEVVFPWPPLCCRRTGNFIPLNEEGCRLGHMDYLFTKGCFEHIGHAIDSYTWGISWFGFAILMWTLPVMLIAMYFYTML

SEQ ID NO: 181 - DNA, 10810 bp, Homo sapiens
accagcaggactgatgtgcacacagaaggaatgaagtatggatgtgaaagaacgcaggccttactgctccctgaccaagagcagacgagagaaggaacggcgctacacaaattcctccgcagacaatgaggagtgccgggtacccacacagaagtcctacagttccagcgagacattgaaagcttttgatcatgattcctcgcggctgctttacggcaacagagtgaaggatttggttcacagagaagcagacgagttcactagacaaggacagaattttaccctaaggcagttaggagtttgtgaaccagcaactcgaagaggactggcattttgtgcggaaatggggctccctcacagaggttactctatcagtgcagggtcagatgctgatactgaaaatgaagcagtgatgtccccagagcatgccatgagactttggggcaggggggtcaaatcaggccgcagctcctgcctgtcaagtcggtccaactcagccctcaccctgacagatacggagcacgaaaacaagtccgacagtgagaatgagcaacctgcaagcaatcaaggccagtctaccctgcagcccttgccgccttcccataagcagcactctgcacagcatcatccatccatcacttctctcaacagaaactccctgaccaatagaaggaaccagagtccggccccgccggctgctttgcccgccgagctgcaaaccacacccgagtccgtccagctgcaggacagctgggtccttggcagtaatgtaccactggaaagcaggcatttcctattcaaaacaggaacaggtacaacgccactgttcagtactgcaaccccaggatacacaatggcatctggctctgtttattcaccacctactcggccactacctagaaacaccctatcaagaagtgcttttaaattcaagaagtcttcaaagtactgtagctggaaatgcactgcactgtgtgccgtaggggtctcggtgctcctggcaatactcctgtcttattttatagcaatgcatctctttggcctcaactggcagctacagcagactgaaaatgacacatttgagaatggaaaagtgaattctgataccatgccaacaaacactgtgtcattaccttctggagacaatggaaaattaggtggatttacgcaagaaaataacaccatagattccggagaacttgatattggccgaagagcaattcaagagattcctcccgggatcttctggagatcacagctcttcattgatcagccacagtttcttaaattcaatatctctcttcagaaggatgcattgattggagtatatggccggaaaggcttaccgccttcccatactcagtatgacttcgtggagctcctggatggcagcaggctgattgccagagagcagcggagcctgcttgagacggagagagccgggcggcaggcgagatccgtcagccttcatgaggccggctttatccagtacttggattctggaatctggcatctggctttttataatgatgggaaaaatgcagagcaggtgtcttttaataccattgttatagagtctgtggtggaatgtccccgaaattgccatggaaatggagaatgcgtttctggaacttgccattgttttccaggatttctgggtccggattgttcaagagccgcctgtccagtgttatgtagtggcaacgggcagtactccaagggccgctgcctgtgtttcagcggctggaagggcaccgagtgtgatgtgccgactacccagtgtattgacccacagtgtgggggtcgtgggatttgtatcatgggctcttgtgcttgcaactcaggatacaaaggagaaagttgtgaagaagctgactgtatagaccctgggtgttctaatcatggtgtgtgtatccacggggaatgtcactgcagtccaggatggggaggtagcaattgtgaaatactgaagaccatgtgtccagaccagtgctccggccacggaacgtatcttcaagaaagtggctcctgcacgtgtgaccctaactggactggcccagactgctcaaacgaaatatgttctgtggactgtggctcacacggcgtttgcatgggggggacgtgtcgctgtgaagaaggctggacgggcccagcctgtaatcagagagcctgccacccccgctgtgccgagcacgggacctgcaaggatggcaagtgtgaatgcagccagggctggaatggagagcactgcactatcgagggttgtcctggtctgtgcaacagcaatggaagatgtaccctggaccaaaatggctggcattgtgtgtgccagcctggatggagaggagcaggctgtgacgtagccatggagactctttgcacagatagcaaggacaatgaaggagatggactcattgactgcatggatcccgattgctgcctacagagttcctgccagaatcagccctattgtcggggactgccggatcctcaggacatcattagccaaagccttcaatcgccttctcagcaagctgccaaatccttttatgatcgaatcagtttccttataggatctgatagcacccatgttatacctggagaaagtcctttcaataagagccttgcatctgtcatcagaggccaagtactgactgctgatggaactccacttattggagtaaatgtctcgtttttccattacccagaatatggatatactattacccgccaggacggaatgtttgacttggtggcaaatggtggggcctctctaactttggtatttgaacgatccccattcctcactcagtatcatactgtgtggattccatggaatgtcttttatgtgatggataccctagtcatgaagaaagaagagaatgatattcccagctgtgatctgagtggattcgtgaggccaaatcccatcattgtgtcatcacctttatccacctttttcagatcttctcctgaagacagtcccatcattcccgaaacacaggtactccacgaggaaactacaattccaggaacagatttgaaactctcctacttgagttccagagctgcagggtataagtcagttctcaagatcaccatgacccagtctattattccatttaatttaatgaaggttcatcttatggtagctgtagtaggaagactcttccaaaagtggtttcctgcctcaccaaacttggcctatactttcatatgggataaaacagatgcatataatcagaaagtctatggtctatctgaagctgttgtgtcagttggatatgagtatgagtcgtgtttggacctgactctgtgggaaaagaggactgccattctgcagggctatgaattggatgcgtccaacatgggtggctggacattagataaacatcacgtgctggatgtacagaacggtatactgtacaagggaaacggggaaaaccagttcatctcccagcagcctccagtcgtgagtagcatcatgggcaatgggcgaaggcgcagcatttcctgccccagttgcaatggtcaagctgatggtaacaagttactggccccagtggcgctagcttgtgggatcgatggcagtctgtacgtaggcgatttcaactatgtgcggcggatattcccttctggaaatgtaacaagtgtcttagaactaagcagcaacccagctcatagatactaccttgcaacggatccagtcacgggagatctgtacgtttctgacacaaacacccgcagaatttatcgcccaaagtcacttacgggggcaaaagacttgactaaaaatgcagaagtcgtcgcagggacaggggagcaatgccttccgtttgacgaggcgagatgtggggatggagggaaggccgtggaagccacactcatgagtcccaaaggaatggcagttgataagaatggattaatctactttgttgatggaaccatgattaggaaagttgaccaaaatggaatcatatcaactcttctgggctctaacgatttgacttcagccagacctttaacttgtgacaccagcatgcacatcagccaggtacgtctggaatggcccactgacctagccattaaccctatggataactccatttatgtcctggataataatgtagttttacagatcactgaaaatcgtcaagttcgcattgctgctggacggcccatgcactgtcaggttcccggagtggaatatcctgtggggaagcacgcggtgcagacaacactggaatcagccactgccattgctgtgtcctacagtggggtcctgtacattactgaaactgatgagaagaaaattaaccggataaggcaggtcacaacagatggagaaatctccttagtggccggaataccttcagagtgtgactgcaaaaatgatgccaactgtgactgttaccagagtggagatggctacgccaaggatgccaaactcagtgccccatcctccctggctgcttctccagatggtacactgtatattgcagatctagggaatatccggatccgggctgtgtcaaagaataagcctttacttaactctatgaacttctatgaagttgcgtctccaactgatcaagaactctacatctttgacatcaatggtactcaccaatatactgtaagtttagtcactggtgattacctttacaattttagctacagcaatgacaatgatattactgctgtgacagacagcaatggcaacacccttagaattagacgggacccaaatcgcatgccagttcgagtggtgtctcctgataaccaagtgatatggttgacaataggaacaaatggatgtttgaaaagcatgactgctcaaggactggaattagttttgtttacttaccatggcaatagtggccttttagccactaaaagtgatgaaactggatggacaacgttttttgactatgacagtgaaggtcgtctgacaaatgttacgtttccaactggagtggtcacaaacctgcatggggacatggacaaggctatcacagtggacattgagtcatctagccgagaagaagatgtcagcatcacttcaaatctgtcctcgatcgattctttctacaccatggttcaagatcagttaagaaacagctaccagattggttatgacggctccctcagaattatctacgccagtggcctggactcacactaccaaacagagccgcacgttctggctggcaccgctaatccgacggttgccaaaagaaacatgactttgcctggcgagaacggtcaaaacttggtggaatggagattccgaaaagagcaagcccaagggaaagtcaatgtctttggccgcaagctcagggttaatggcagaaacctcctttcagttgactttgatcgaacaacaaagacagaaaagatctatgacgaccaccgtaaatttctactgaggatcgcctacgacacgtctgggcacccgactctctggctgccaagcagcaagctgatggccgtcaatgtcacctattcatccacaggtcaaattgccagcatccagcgaggcaccactagcgagaaagtagattatgacggacaggggaggatcgtgtctcgggtctttgctgatggtaaaacatggagttacacatatttagaaaagtccatggttcttctgcttcatagccagcggcagtacatcttcgaatacgatatgtgggaccgcctgtctgccatcaccatgcccagtgtggctcgccacaccatgcagaccatccgatccattggctactaccgcaacatatacaaccccccggaaagcaacgcctccatcatcacggactacaacgaggaagggctgcttctacaaacagctttcttgggtacaagtcggagggtcttattcaaatacagaaggcagactaggctctcagaaattttatatgatagcacaagagtcagttttacctatgatgaaacagcaggagtcctaaagacagtaaacctccagagtgatggttttatttgcaccattagatacaggcaaattggtcccctgattgacaggcagattttccgctttagtgaagatgggatggtaaatgcaagatttgactatagctatgacaacagctttcgagtgaccagcatgcagggtgtgatcaatgaaacgccactgcctattgatctgtatcagtttgatgacatttctggcaaagttgagcagtttggaaagtttggagttatatattatgatattaaccagatcatttctacagctgtaatgacctatacgaagcactttgatgctcatggccgtatcaaggagattcaatatgagatattcaggtcgctcatgtactggattacaattcagtatgataacatgggtcgggtaaccaagagagagattaaaatagggccctttgccaacaccaccaaatatgcttatgaatatgatgttgatggacagctccaaacagtttacctcaatgaaaagataatgtggcggtacaactacgatctgaatggaaacctccatttactgaacccaagtaacagtgcgcgtctgacaccccttcgctatgacctgcgagacagaatcactcgactgggtgatgttcaatatcggttggatgaagatggtttcctacgtcaaaggggcacggaaatctttgaatatagctccaaggggcttctaactcgagtttacagtaaaggcagtggctggacagtgatctaccgttatgacggcctgggaaggcgtgtttctagcaaaaccagtctaggacagcacctgcagtttttttatgctgacttaacttatcccactaggattactcatgtctacaaccattcgagttcagaaattacctccctgtattatgatctccaaggacatctttttgccatggaaatcagcagtggggatgaattctatattgcatcggataacacagggacaccactggctgtgttcagtagcaatgggcttatgctgaaacagattcagtacactgcatatggggaaatctattttgactctaatattgactttcaactggtaattggatttcatggtggcctgtatgacccactcaccaaattaatccactttggagaaagagattatgacattttggcaggacggtggacaacacctgacatagaaatctggaaaagaattgggaaggacccagctccttttaacttgtacatgtttaggaataacaaccctgcaagcaaaatccatgacgtgaaagattacatcacagatgttaacagctggctggtgacatttggtttccatctgcacaatgctattcctggattccctgttcccaaatttgatttaacagaaccttcttacgaacttgtgaagagtcagcagtgggatgatataccgcccatcttcggagtccagcagcaagtggcgcggcaggccaaggccttcctgtcgctggggaagatggccgaggtgcaggtgagccggcgccgggccggcggcgcgcagtcctggctgtggttcgccacggtcaagtcgctgatcggcaagggcgtcatgctggccgtcagccagggccgcgtgcagaccaacgtgctcaacatcgccaacgaggactgcatcaaggtggcggccgtgctcaacaacgccttctacctggagaacctgcacttcaccatcgagggcaaggacacgcactacttcatcaagaccaccacgcccgagagcgacctgggcacgctgcggttgaccagcggccgcaaggcgctggagaacggcatcaacgtgacggtgtcgcagtccaccacggtggtgaacggcaggacgcgcaggttcgcggacgtggagatgcagttcggcgcgctggcgctgcacgtgcgctacggcatgaccctggacgaggagaaggcgcgcatcctggagcaggcgcggcagcgcgcgctcgcccgggcctgggcgcgcgagcagcagcgcgtgcgcgacggcgaggagggcgcgcgcctctggacggagggcgagaagcggcagctgctgagcgccggcaaggtgcagggctacgacgggtactacgtactctcggtggagcagtaccccgagctggccgacagcgccaacaacatccagttcctgcggcagagcgagatcggcaggaggtaacgcccgggccgcgcccgccgagccgctcacgccctgcccacattgtcctgtggcacaacccgagtgggactctccaacgcccaagagccttcctcccgggggaatgagactgctgttacgacccacacccacaccgcgaaaacaaggaccgcttttttccgaatgaccttaaaggtgatcggctttaacgaatatgtttacatatgcatagcgctgcactcagtcggactgaacgtagccagaggaaaaaaaaatcatcaaggacaaaggcctcgacctgttgcgctgggccgtctgttccttctaggcactgtatttaactaactttaaaaaagaaaaaaaaatgtgtacagtgtttccaaatagtcccgaattgtcgacctttgcttacaagaagtagtctgtctgcataggatgtgatagctatctctgttcattttacaatgtggggcaaagttactgtttctagacaacccaactgctttccctgtgcagctttgtagaaggacattggcacagtgacttctgcggcggggatttattaatggattttacaatgctaacgtggtttcccttcggggaaaaaactggcaactagaatccttgtcactgataagcaaaggaaatcctgatttttttgtaaattatgtgagacaagttgtttatggatttttatatgaattacaatttactgtacatcaaatcttagtctcagaggagttaatttatgtaaagtgtttaaaaatttatacttaaaaataaaatgataaaaacgtgaactgtgtgatttttttaaaaggattgcaccttttgttatctgttatagctgtacagtatgaattattatattgtagagatataacaacttatgcctataatgtccagaagtgttaatatttttgtattaggttgaaaaaatgtgcaagcttctatcactagatggataggaccgtgcaattctaggtgggtggcgaatcagagagctcctttctcttccctctctcacgcatcaggccagtgtcctcagcattgtcaactgagaggcacagtagacaactagggctggtggaatgtaagggaagaagattgaaaaaacgggaggaagggttctctggccctctctcaaccttgcaagtcaatggggagttgttgatataattaaccccgaggtttttactgttactgttccaaagctctgtctcttgatggaggagagaccacatcagatgctggggaaataggaggaggaaaggttctgatgtagtcgtgatcctaaacacgtgtcttaagatctaggaaagacagcagaaaccgagcagtggtgggtgagccagatggagccggtcagggttactctaagcccacatgaccaaaccatcttggggggctggtttgaatgacagcctctgctctgtctcggggaagccgggggtggcagatccagctggaagtgaactgacagccgcgccctcctgcacacatgcatgcacgcgtgtgggaacgagcccagccgccatctgcacttccgtgtcggctcagctctgacaaatctctttcctgagcactaaattcagccacgaaaatatttttagaagatatttctcagttcatcgagctatagtacacactgttttcctctatgtataatggtgataaaatatagcaagtgaacatgtcgtaaatataaaggttcaagtgatgtattgaaaataattttctaactgctttgtatgtatcacatactctaaattgcacagtaggcgtgtttattaaacagatgattggctgggaaagtttcaaaatagctactgaatttacagtatcagtgctattactgtctttgtgtatttggtagagcataccgaagtaattaatcttctaatgaatgctgatgatattttattagaatgaaagcacagattagcattaatattttttattctggaaatcctttggcaagtattatgaagcccaaatttagaaaactatgagatttcaaaccacataaacatgattctgttttccattttattttttaactgttaggtatttgcagttctgttccgtggaacttctgcaggcctgtatttagcatgctgtaagtacttttgggtgaaataggctctgagtctaaattctcagacatgtttctgatgtattaccatgaaaagcttgtgccacatgacagaagtgagatcatagtcttaacctcttcttgacgtggactggtcttcactcgggcaccgataaataacagatttggagtatctcctggtgcttattttagatgatgaagtcaaatcaacccaattagtgtcctgttagtaggtataatgagcctatttctttctaaaaagacttgtgatctggacatgcttttacaagaaatagtgaccttggggaatatgtaaacaaaagacctttttctaagagttgggagggggtgggggactgtataatgaaaagaattagcttacaaaaaagaaattgatattcaaagtattttaggcaaagccagtcaaaatgctttcatgatattttgagatgtaaattttgtctgatttgtattgttcttttcatttgccttcttaactttatatgtgacctgaattttccataacttgatgactatagattgcacctaggcattccaataaaagccaacccaatgtg

SEQ ID NO: 182 - protein, 2699 aa, Homo sapiens
MDVKERRPYCSLTKSRREKERRYTNSSADNEECRVPTQKSYSSSETLKAFDHDSSRLLYGNRVKDLVHREADEFTRQGQNFTLRQLGVCEPATRRGLAFCAEMGLPHRGYSISAGSDADTENEAVMSPEHAMRLWGRGVKSGRSSCLSSRSNSALTLTDTEHENKSDSENEQPASNQGQSTLQPLPPSHKQHSAQHHPSITSLNRNSLTNRRNQSPAPPAALPAELQTTPESVQLQDSWVLGSNVPLESRHFLFKTGTGTTPLFSTATPGYTMASGSVYSPPTRPLPRNTLSRSAFKFKKSSKYCSWKCTALCAVGVSVLLAILLSYFIAMHLFGLNWQLQQTENDTFENGKVNSDTMPTNTVSLPSGDNGKLGGFTQENNTIDSGELDIGRRAIQEIPPGIFWRSQLFIDQPQFLKFNISLQKDALIGVYGRKGLPPSHTQYDFVELLDGSRLIAREQRSLLETERAGRQARSVSLHEAGFIQYLDSGIWHLAFYNDGKNAEQVSFNTIVIESVVECPRNCHGNGECVSGTCHCFPGFLGPDCSRAACPVLCSGNGQYSKGRCLCFSGWKGTECDVPTTQCIDPQCGGRGICIMGSCACNSGYKGESCEEADCIDPGCSNHGVCIHGECHCSPGWGGSNCEILKTMCPDQCSGHGTYLQESGSCTCDPNWTGPDCSNEICSVDCGSHGVCMGGTCRCEEGWTGPACNQRACHPRCAEHGTCKDGKCECSQGWNGEHCTIEGCPGLCNSNGRCTLDQNGWHCVCQPGWRGAGCDVAMETLCTDSKDNEGDGLIDCMDPDCCLQSSCQNQPYCRGLPDPQDIISQSLQSPSQQAAKSFYDRISFLIGSDSTHVIPGESPFNKSLASVIRGQVLTADGTPLIGVNVSFFHYPEYGYTITRQDGMFDLVANGGASLTLVFERSPFLTQYHTVWIPWNVFYVMDTLVMKKEENDIPSCDLSGFVRPNPIIVSSPLSTFFRSSPEDSPIIPETQVLHEETTIPGTDLKLSYLSSRAAGYKSVLKITMTQSIIPFNLMKVHLMVAVVGRLFQKWFPASPNLAYTFIWDKTDAYNQKVYGLSEAVVSVGYEYESCLDLTLWEKRTAILQGYELDASNMGGWTLDKHHVLDVQNGILYKGNGENQFISQQPPVVSSIMGNGRRRSISCPSCNGQADGNKLLAPVALACGIDGSLYVGDFNYVRRIFPSGNVTSVLELSSNPAHRYYLATDPVTGDLYVSDTNTRRIYRPKSLTGAKDLTKNAEVVAGTGEQCLPFDEARCGDGGKAVEATLMSPKGMAVDKNGLIYFVDGTMIRKVDQNGIISTLLGSNDLTSARPLTCDTSMHISQVRLEWPTDLAINPMDNSIYVLDNNVVLQITENRQVRIAAGRPMHCQVPGVEYPVGKHAVQTTLESATAIAVSYSGVLYITETDEKKINRIRQVTTDGEISLVAGIPSECDCKNDANCDCYQSGDGYAKDAKLSAPSSLAASPDGTLYIADLGNIRIRAVSKNKPLLNSMNFYEVASPTDQELYIFDINGTHQYTVSLVTGDYLYNFSYSNDNDITAVTDSNGNTLRIRRDPNRMPVRVVSPDNQVIWLTIGTNGCLKSMTAQGLELVLFTYHGNSGLLATKSDETGWTTFFDYDSEGRLTNVTFPTGVVTNLHGDMDKAITVDIESSSREEDVSITSNLSSIDSFYTMVQDQLRNSYQIGYDGSLRIIYASGLDSHYQTEPHVLAGTANPTVAKRNMTLPGENGQNLVEWRFRKEQAQGKVNVFGRKLRVNGRNLLSVDFDRTTKTEKIYDDHRKFLLRIAYDTSGHPTLWLPSSKLMAVNVTYSSTGQIASIQRGTTSEKVDYDGQGRIVSRVFADGKTWSYTYLEKSMVLLLHSQRQYIFEYDMWDRLSAITMPSVARHTMQTIRSIGYYRNIYNPPESNASIITDYNEEGLLLQTAFLGTSRRVLFKYRRQTRLSEILYDSTRVSFTYDETAGVLKTVNLQSDGFICTIRYRQIGPLIDRQIFRFSEDGMVNARFDYSYDNSFRVTSMQGVINETPLPIDLYQFDDISGKVEQFGKFGVIYYDINQIISTAVMTYTKHFDAHGRIKEIQYEIFRSLMYWITIQYDNMGRVTKREIKIGPFANTTKYAYEYDVDGQLQTVYLNEKIMWRYNYDLNGNLHLLNPSNSARLTPLRYDLRDRITRLGDVQYRLDEDGFLRQRGTEIFEYSSKGLLTRVYSKGSGWTVIYRYDGLGRRVSSKTSLGQHLQFFYADLTYPTRITHVYNHSSSEITSLYYDLQGHLFAMEISSGDEFYIASDNTGTPLAVFSSNGLMLKQIQYTAYGEIYFDSNIDFQLVIGFHGGLYDPLTKLIHFGERDYDILAGRWTTPDIEIWKRIGKDPAPFNLYMFRNNNPASKIHDVKDYITDVNSWLVTFGFHLHNAIPGFPVPKFDLTEPSYELVKSQQWDDIPPIFGVQQQVARQAKAFLSLGKMAEVQVSRRRAGGAQSWLWFATVKSLIGKGVMLAVSQGRVQTNVLNIANEDCIKVAAVLNNAFYLENLHFTIEGKDTHYFIKTTTPESDLGTLRLTSGRKALENGINVTVSQSTTVVNGRTRRFADVEMQFGALALHVRYGMTLDEEKARILEQARQRALARAWAREQQRVRDGEEGARLWTEGEKRQLLSAGKVQGYDGYYVLSVEQYPELADSANNIQFLRQSEIGRR

SEQ ID NO: 183 - DNA, 10210 bp, Homo sapiens
gtagtacggttccaactcccagctcgcacaccgctggcggacaccccagtaacaagtgagagcgctccaccccgcagtcccccccgcctctcctccctgggtcccctcggctctcggaagaaaaaccaacagcatctccagctctcgcgcggaattgtctcttcaactttacccaaccgacgacaaggaaccagcctcaaccttttaatgcacagcccggccacaggattgccttccatctcctcttggtccctcctggatgtggtttattgatgacttgcgagcccctcagagagctgtcttccctcctctggctccctccgtttccttgagttagttttctaaggttttaccggggctcgggatctcttggaccgaatggaactttttgctgcctgcttttgctgctgattctgtcagtggacaaggaaaaaggcttcgaaggcagcagaggcgcaggggaggtggagaaagaggtggaggaagaggacgaggaggaggaggaagccgaaggggctcggcgcgtgtgtgtgcatgtgtgcatgcgtgtgtgagtgcatgtgtgtgagtgctgccgctgcccgcgacccctggccccgaaggtgttggctgaaatatggagaatagtcttagatgtgtttgggtacccaagctggcttttgtactcttcggagcttccttgttcagcgcgcatcttcaagtaaccggttttcaaattaaagctttcacagcactgcgcttcctctcagaaccttctgatgccgtcacaatgcggggaggaaatgtcctcctcgactgctccgcggagtccgaccgaggagttccagtgatcaagtggaagaaagatggcattcatctggccttgggaatggatgaaaggaagcagcaactttcaaatgggtctctgctgatacaaaacatacttcattccagacaccacaagccagatgagggactttaccaatgtgaggcatctttaggagattctggctcaattattagtcggacagcaaaagttgcagtagcaggaccactgaggttcctttcacagacagaatctgtcacagccttcatgggagacacagtgctactcaagtgtgaagtcattggggagcccatgccaacaatccactggcagaagaaccaacaagacctgactccaatcccaggtgactcccgagtggtggtcttgccctctggagcattgcagatcagccgactccaaccgggggacattggaatttaccgatgctcagctcgaaatccagccagctcaagaacaggaaatgaagcagaagtcagaattttatcagatccaggactgcatagacagctgtattttctgcaaagaccatccaatgtagtagccattgaaggaaaagatgctgtcctggaatgttgtgtttctggctatcctccaccaagttttacctggttacgaggcgaggaagtcatccaactcaggtctaaaaagtattctttattgggtggaagcaacttgcttatctccaatgtgacagatgatgacagtggaatgtatacctgtgttgtcacatataaaaatgagaatattagtgcctctgcagagctcacagtcttggttccgccatggtttttaaatcatccttccaacctgtatgcctatgaaagcatggatattgagtttgaatgtacagtctctggaaagcctgtgcccactgtgaattggatgaagaatggagatgtggtcattcctagtgattattttcagatagtgggaggaagcaacttacggatacttggggtggtgaagtcagatgaaggcttttatcaatgtgtggctgaaaatgaggctggaaatgcccagaccagtgcacagctcattgtccctaagcctgctatcccaagctccagtgtcctcccttcggctcccagagatgtggtccctgtcttggtttccagccgatttgtccgtctcagctggcgcccacctgcagaagcgaaagggaacattcaaactttcacggtctttttctccagagaaggtgacaacagggaacgagcattgaatacaacacagcctgggtcccttcagctcactgtgggaaacctgaagccagaagccatgtacacctttcgagttgtggcttacaatgaatggggaccgggagagagttctcaacccatcaaggtggccacacagcctgagttgcaagttccagggccagtagaaaacctgcaagctgtatctacctcacctacctcaattcttattacctgggaaccccctgcctatgcaaacggtccagtccaaggttacagattgttctgcactgaggtgtccacaggaaaagaacagaatatagaggttgatggactatcttataaactggaaggcctgaaaaaattcaccgaatatagtcttcgattcttagcttataatcgctatggtccgggcgtctctactgatgatataacagtggttacactttctgacgtgccaagtgccccgcctcagaacgtctccctggaagtggtcaattcaagaagtatcaaagttagctggctgcctcctccatcaggaacacaaaatggatttattaccggctataaaattcgacacagaaagacgacccgcaggggtgagatggaaacactggagccaaacaacctctggtacctattcacaggactggagaaaggaagtcagtacagtttccaggtgtcagccatgacagtcaatggtactggaccaccttccaactggtatactgcagagactccagagaatgatctagatgaatctcaagttcctgatcaaccaagctctcttcatgtgaggccccagactaactgcatcatcatgagttggactcctcccttgaacccaaacatcgtggtgcgaggttatattatcggttatggcgttgggagcccttacgctgagacagtgcgtgtggacagcaagcagcgatattattccattgagaggttagagtcaagttcccattatgtaatctccctaaaagcttttaacaatgccggagaaggagttcctctttatgaaagtgccaccaccaggtctataaccgatcccactgacccagttgattattatcctttgcttgatgatttccccacctcggtcccagatctctccacccccatgctcccaccagtaggtgtacaggctgtggctcttacccatgatgctgtgagggtcagctgggcagacaactctgtccctaagaaccaaaagacgtctgaggtgcgactttacaccgtccggtggagaaccagcttttctgcaagtgcaaaatacaagtcagaagacacaacatctctaagttacacagcaacaggcctcaaaccaaacacaatgtatgaattctcggtcatggtaacaaaaaacagaaggtccagtacttggagcatgactgcacatgccaccacgtatgaagcagcccccacctctgctcccaaggacttgacagtcattactagggaagggaagcctcgtgccgtcattgtgagttggcagcctcccttggaagccaatgggaaaattactgcttacatcttattttataccttggacaagaacatcccaattgatgactggattatggaaacaatcagtggtgataggcttactcatcaaatcatggatctcaaccttgatactatgtattactttcgaattcaagcacgaaattcaaaaggagtggggccactctctgatcctatcctcttcaggactctgaaagtggaacaccctgacaaaatggctaatgaccaaggtcgtcatggagatggaggttattggccagttgatactaatttgattgatagaagcaccctaaatgagccgccaattggacaaatgcaccccccgcatggcagtgtcactcctcagaagaacagcaacctgcttgtgatcattgtggtcaccgttggtgtcatcacagtgctggtagtggtcatcgtggctgtgatttgcacccgacgctcttcagcccagcagagaaagaaacgggccacccacagtgctggcaaaaggaagggcagccagaaggacctccgaccccctgatctttggatccatcatgaagaaatggagatgaaaaatattgaaaagccatctggcactgaccctgcaggaagggactctcccatccaaagttgccaagacctcacaccagtcagccacagccagtcagaaacccaactgggaagcaaaagcacctctcattcaggtcaagacactgaggaagcagggagctctatgtccactctggagaggtcgctggctgcacgccgagccccccgggccaagctcatgattcccatggatgcccagtccaacaatcctgctgtcgtgagcgccatcccggtgccaacgctagaaagtgcccagtacccaggaatcctcccgtctcccacctgtggatatccccacccgcagttcactctccggcctgtgccattcccaacactctcagtggaccgaggtttcggagcaggaagaagtcagtcagtgagtgaaggaccaactacccaacaaccacctatgctgcccccatctcagcctgagcattctagcagcgaggaggcaccaagcagaaccatccccacagcttgtgttcgaccaactcacccactccgcagctttgctaatcctttgctacctccaccaatgagtgcaatagaaccgaaagtcccttacacaccacttttgtctcagccagggcccactcttcctaagacccatgtgaaaacagcctcccttgggttggctggaaaagcaagatcccctttgcttcctgtgtctgtgccaacagcccctgaagtgtctgaggagagccacaaaccaacagaggattcagccaatgtgtatgaacaggatgatctgagtgaacaaatggcaagtttggaaggactcatgaagcagcttaatgccatcacaggctcagccttttaacatgtatttctgaatggatgaggtgaattttccgggaactttgcagcataccaattacccataaacagcacacctgtgtccaagaactctaaccagtgtacaggtcacccatcaggaccactcagttaaggaagatcctgaagcagttcagaaggaataagcattccttctttcacaggcatcaggaattgtcaaatgatgattatgagttccctaaacaaaagcaaagatgcattttcactgcaatgtcaaagtttaagctgctagaatagtcatgggcctttgtcactgcagtgaccacactgtcataactaatacctatgttttcctttgtcaaggcctgttgtttaatgtgtaggtctagtcttacaaaatgcaagtgcattatttaagcctgtaccatgccatggcaaaccagtgcaagctcactattttgttttcaacttaaacatacaaagcacccatgggaatctctcatgccatagcaccaaaggattggatgttttccttacagcacaaaaagtaaatagtaaacaaacaaaaggcagagaatgcttatgtttgtaactcagtcattcatcttgcacaagtggtggatattagtgagtggctaaaaattcacctattttggcaagtatttgtaaatccacccttggttaatatgtatgtctggagtccaggaatataaaaatctgcaactagtggcattctgccagcagcagtacatttctggaaagaggatataatatgcaatcttctcagacacatggtaattatatgcttaagcttgtaataggacagttttcaatttgggtggcttttgtgccataccacactgtgatacaatttcaaagcttcactaaggccatcttccttaggagtttggccagaagaatgcccccaccccttcaccccatccctccctgagttctccttggcaactagcgttgggtgaaatggccagctccacatgtcatatggtgcactggccaatgtcgcctgtcttctaatcccgtagaaatggcagactccctgagagcaggaagagaaggaaaataaaaggtagcttctaacagtaccttctcttaaagaatgccaactctgcctacagggtcagtgttggcaagcattggccaccagacccttttgttaagggaaacttttacactacacctgtgtcagagtcagggggaagcagaggggcaggtgccacctgacacttccgacatgtaaatccagcagatacttttcaaagcagcatcttaaactgtggactacagttttaaacttctattgccatgtttatctacagcttggaactagctaaaattaagaacattttgtatgcagcattttagtttctgaattttcagctgcatttggagttaatccctgtttatgcagctgaatcgccaaaagggagctagtttgcatatttatcagttaggtgacttgaaaacccaatgagagagtttcagctgaattattcctttcagctctgcctttgatttcaagcttgagtaggtcataattttaaaagagcatggaagggataggatctttacaacctaatagctccttttattaggtgggtaattatatatgaatccctgaataaaatattttgagcaaaatggcactgtaacagaagtaataattcagtttatttttttacagttttatgtcgggaaggaaatctgatgtcaaagagagggctgttcaaatggttcattagaaagtccggtccatttgcgaatttgttccttcaacaagagtgctcattcaagttactcagattttctggaagtcttttctgaagagctatgtgatgttgttctatgggacagactactcttatttaacatctgggcacttaggtagacaaccttctactgacctggaataaagtgtttcctaacataatattgaattattcagaaataatccattacttcaaaaaagaaaatattcattgggctagcccaaccttctctaggccctaagaattattacctcccctttctaattctagcaaacatggaacattctccttaggcacttgacacccacgagggtaatcctgagtgctcagtttggaataggttgcaaatctcagattttagggattgagtcacaccttcaatctatagaatgaagttgaccaattaaaaaaaaaaaaaaaacctatcattttcacaaatttctagatccttctagtcaaaaataattatttaggaaataaaatttttaaaaatccatttaaatacatgttatttgtcttcagtggaagttatatttctgctgcatgcttttgaaactttcttcattaaatagaatggtttgtcttagtaactggcaatgccagtattagcaccatgcatttaatctataatacaatcaatttaaacatcctcaaaaaactctagtatcatttacctggtagtattaatatacaatgatgtcaccacaacttttgtataactctgttccctttaccctcaaatgattcatatatgtatataattgcctgcccaagttttcaggtaacttattaatttcccagtctcctgatctcttgacaagaagaaacctgtgaatactgcaaactagcctctgacttcctcctactgagtctagttcatggtatccaggactctttatgctcataactctctctgattcccattgggtgatacctgacagccaaccagccgctctgccaccagaactcatttctccctgaaaaagaagaaaatcatatttggcagagcattctctggtctgccctgtaatgtgcttaaatgtcaggcaacatcctcttttttttaaaaaaaatggtatttttctttaaatttcaccctaataagaaagctattttctctcctctgcagaaatttctgcatttgtgaaacttataaaaatttagatagttcaaatgtataaagaatatttggatgatgctctagccaaaagttaaatatttcgtagtgaatcatagccaataagaaaccagtcatacttgcctctttgaataacagagatataagcttctagaatatttaaataatgaagttttacatttgggtattataaaatgcatactcaattgaatgagctgaaaaaaataccaagccagtgatataagtggagatttattaaggattcctgttgagtatattcttagtttcctcaaaatagggattattcaaaattaggtgtatgttcaatctcctgctttggttccagctacacaaggagagccatcctgtgctagtgtgatgtttcagacaacattctgaaactaaaatgtttggcacttattggcttttccaataaagaatctcttaagtacaggtatttctggaagctgttggtgtctgtgcttgaagatgattgctgatacttatccaccctttgggtacttctgttgactttgtttaaataatcatcttatggttgtccccaaatgtaatatggtatctcagatatagcagctggactgtaattacaacaaaaggttacctctaaagataacatcttaccattttagataaaattgtgtcccagaattcttatggtttcggaatgtacatttctagtcaatgaaagaaagaaaaatggaaaaattgtctagtttcaggcatgtttaaagaaaacaaagtcatctgaactttaaaatagatgcagagcagggttactttccctttcactcagttcccttcatgcaaccacaggcagtcctgcaggccagaggttactatcctaacctgctcataaccatatactatacagagcccacaactttctggagatgcagaagcagccatacactcaagtctctgtttttgtaaatcacattcaaagcaacattttactcataatttgcatttctctggtgactttcagaaatcactttagtattgtacagaaaagctttttatttgagtctagtgtttaaaattaaattggatacttgggaaaatcatagataggtgttttgtatgatattccattccaatgcaaaatatatgtacccatgcctcaatgtatcttgctatctaaatacctgttgccaaaaagtattgatttgggaaaaaaaatgccaatttcctggtcagtgaggttatgtaaaagacaaaataccacacccatatcagcaaatgaatattactactcatctggactcttcgttgccactattgcataacgttcacgtggcagacttccagttgcactctctgaaggacttttttctcttactctcaatagagagcctttgtacattgtcatcctatgattgttgttggtagaagagcaagagcaaaactctgcaagatttaataaacacaggggcatgggccaagggatctcactgtgtgctgaacatgtattttcagatgcaagaaaggaatgatggagaggaggagaaatgctgttttttattattgtagggtaaatctgacaattctgaactttgtgaattgtcagcttgtttgggggaagggtgggcgggtatggggtgtactttttataagtaatatttaatttattatttagagtggcttctttttggataatttatgataaaaagggagatctggttgggatctagatacggctgttaaagctgcagtgttccatacctcagagggaccactttggaaatgaattgtccattgctgagtatgaagagatgtccagtccaggcaaagccttcactgaagttccatcatcgccacttctccctttttagggtcattcaaagaagataacaccaaacctaaataattctgaaagcattttgcagatcagtgctactcattcaaagggctttgcaactcaaacagattgttagtgtgctagtgataagtttatttggtagaaatgggtatactacagctttaactagccttagtgagaaaagaaattttttgttgttacaaaacaccttttttaacaaaaaggtattttgagcctacaaaaagtttctttaaactgtcagattctagcattgttaaccaaattagactagtgattgcaatatttaagtgtaaatcttgttctacaagaaaggaaacttgcttacagtttaaaacaatgactgtttctacacatgatcttgtatactactacacaaggaaaagggggttttgtaaacactgtagaacagtctcatattcatttttttatagaaatgttattccaatggtgcattttttgtttaataaataaagttttgatacaaagttc

SEQ ID NO: 184 - protein, 1447 aa, Homo sapiens
MENSLRCVWVPKLAFVLFGASLFSAHLQVTGFQIKAFTALRFLSEPSDAVTMRGGNVLLDCSAESDRGVPVIKWKKDGIHLALGMDERKQQLSNGSLLIQNILHSRHHKPDEGLYQCEASLGDSGSIISRTAKVAVAGPLRFLSQTESVTAFMGDTVLLKCEVIGEPMPTIHWQKNQQDLTPIPGDSRVVVLPSGALQISRLQPGDIGIYRCSARNPASSRTGNEAEVRILSDPGLHRQLYFLQRPSNVVAIEGKDAVLECCVSGYPPPSFTWLRGEEVIQLRSKKYSLLGGSNLLISNVTDDDSGMYTCVVTYKNENISASAELTVLVPPWFLNHPSNLYAYESMDIEFECTVSGKPVPTVNWMKNGDVVIPSDYFQIVGGSNLRILGVVKSDEGFYQCVAENEAGNAQTSAQLIVPKPAIPSSSVLPSAPRDVVPVLVSSRFVRLSWRPPAEAKGNIQTFTVFFSREGDNRERALNTTQPGSLQLTVGNLKPEAMYTFRVVAYNEWGPGESSQPIKVATQPELQVPGPVENLQAVSTSPTSILITWEPPAYANGPVQGYRLFCTEVSTGKEQNIEVDGLSYKLEGLKKFTEYSLRFLAYNRYGPGVSTDDITVVTLSDVPSAPPQNVSLEVVNSRSIKVSWLPPPSGTQNGFITGYKIRHRKTTRRGEMETLEPNNLWYLFTGLEKGSQYSFQVSAMTVNGTGPPSNWYTAETPENDLDESQVPDQPSSLHVRPQTNCIIMSWTPPLNPNIVVRGYIIGYGVGSPYAETVRVDSKQRYYSIERLESSSHYVISLKAFNNAGEGVPLYESATTRSITDPTDPVDYYPLLDDFPTSVPDLSTPMLPPVGVQAVALTHDAVRVSWADNSVPKNQKTSEVRLYTVRWRTSFSASAKYKSEDTTSLSYTATGLKPNTMYEFSVMVTKNRRSSTWSMTAHATTYEAAPTSAPKDLTVITREGKPRAVIVSWQPPLEANGKITAYILFYTLDKNIPIDDWIMETISGDRLTHQIMDLNLDTMYYFRIQARNSKGVGPLSDPILFRTLKVEHPDKMANDQGRHGDGGYWPVDTNLIDRSTLNEPPIGQMHPPHGSVTPQKNSNLLVIIVVTVGVITVLVVVIVAVICTRRSSAQQRKKRATHSAGKRKGSQKDLRPPDLWIHHEEMEMKNIEKPSGTDPAGRDSPIQSCQDLTPVSHSQSETQLGSKSTSHSGQDTEEAGSSMSTLERSLAARRAPRAKLMIPMDAQSNNPAVVSAIPVPTLESAQYPGILPSPTCGYPHPQFTLRPVPFPTLSVDRGFGAGRSQSVSEGPTTQQPPMLPPSQPEHSSSEEAPSRTIPTACVRPTHPLRSFANPLLPPPMSAIEPKVPYTPLLSQPGPTLPKTHVKTASLGLAGKARSPLLPVSVPTAPEVSEESHKPTEDSANVYEQDDLSEQMASLEGLMKQLNAITGSAF

SEQ ID NO: 185 - DNA, 4253 bp, Homo sapiens
ggtgcatgccgggacggcggtgggtggtgcatgcgctcgcatcatggcggctgagtgggcttctcgtttctggctttgggctacgctgctgattcctgcggccgcggtctacgaagaccaagtgggcaagtttgattggagacagcaatatgttgggaaggtcaagtttgcctccttggaattttcccctggatccaagaagttggttgtagccacagagaagaatgtgattgcagcattaaattcccgaactggggagatcttgtggcgccatgttgacaagggcacggcagaaggggctgtggatgccatgctgctgcacggacaggatgtgatcactgtgtccaatggaggccgaatcatgcgttcctgggagactaacatcgggggcctgaactgggagataaccctggacagtggcagtttccaggcacttgggctggttggcctgcaggagtctgtaaggtacatcgcagtcctgaagaagactacacttgccctccatcacctctccagtgggcacctcaagtgggtggaacatctcccagaaagtgacagcatccactaccagatggtgtattcttacggctctggggtggtgtgggccctcggagttgttcccttcagccatgtgaacattgtcaagtttaatgtggaagatggagagattgttcagcaggttagggtttcaactccgtggctgcagcacctgtctggagcctgtggtgtggtggatgaggctgtcctggtgtgtcctgacccgagctcacgttccctccaaactttggctctggagacggaatgggagttgagacagatcccactgcagtctctcgacttagaatttggaagtggattccaaccccgggtcctgcctacccagcccaacccagtggacgcttcccgggcccagttcttcctgcacttgtccccaagccactatgctctgctgcagtaccattatggaacgctgagtttgcttaaaaacttcccacagactgccctagtgagctttgccaccactggggagaagacggtggctgcagtcatggcctgtcggaatgaagtgcagaaaagtagcagttctgaagatgggtcaatggggagcttttcggagaagtctagttcaaaggactctctggcttgcttcaatcagacctacaccattaacctatacctcgtggagacaggtcggcggctgctggacaccacgataacatttagcctggaacagagcggcactcggcctgagcggctgtatatccaggtgttcttgaagaaggatgactcagtgggctaccgggctttggtgcagacagaggatcatctgctacttttcctgcagcagttggcagggaaggtggtgctgtggagccgtgaggagtccctggcagaagtggtgtgcctagagatggtggacctccccctgactggggcacaggccgagctggaaggagaatttggcaaaaaggcagatggcttgctggggatgttcctgaaacgcctctcgtctcagcttatcctgctgcaagcatggacttcccacctctggaaaatgttttatgatgctcggaagccccggagtcagattaagaatgagatcaacattgacaccctggccagagatgaattcaacctccagaagatgatggtgatggtaacagcctcaggcaagctttttggcattgagagcagctctggcaccatcctgtggaaacagtatctacccaatgtcaagccagactcctcctttaaactgatggtccagagaactactgctcatttcccccatcccccacagtgcaccctgctggtgaaggacaaggagtcgggaatgagttctctgtatgtcttcaatcccatttttgggaagtggagtcaggtagctcccccagtgctgaagcgccccatcttgcagtccttgcttctcccagtcatggatcaagactacgccaaggtgttgctgttgatagatgatgaatacaaggtcacagcttttccagccactcggaatgtcttgcgacagctacatgagcttgccccttccatcttcttctatttggtggatgcagagcagggacggctgtgtggatatcggcttcgaaaggatctcaccactgagctgagttgggagctgaccattcccccagaagtacagcggatcgtcaaggtgaaggggaaacgcagcagtgagcacgttcattcccagggccgtgtgatgggggaccgcagtgtgctctacaagagcctgaaccccaacctgctggccgtggtgacagagagcacagacgcgcaccatgagcgcacctttattggcatcttcctcattgatggcgtcactgggcgtatcattcactcctctgtgcagaagaaagccaaaggccctgtccatatcgtgcattcagagaactgggtggtgtaccagtactggaacaccaaggctcggcgcaacgagtttaccgtactggagctctatgagggcactgagcaatacaacgccaccgccttcagctccctggaccgcccccagctgccccaggtcctccagcagtcctatatcttcccgtcctccatcagtgccatggaggccaccatcaccgaacggggcatcaccagccgacacctgctgattggactaccttctggagcaattctttcccttcctaaggctttgctggatccccgccgccccgagatcccaacagaacaaagcagagaggagaacttaatcccgtattctccagatgtacagatacacgcagagcgattcatcaactataaccagacagtttctcgaatgcgaggtatctacacagctccctcgggtctggagtccacttgtttggttgtggcctatggtttggacatttaccaaactcgagtctacccatccaagcagtttgacgttctgaaggatgactatgactacgtgttaatcagcagcgtcctctttggcctggtttttgccaccatgatcactaagagactggcacaggtgaagctcctgaatcgggcctggcgataaagaacaaagactgtgcctaaaagtggagagccaggggagtgtgggtcagataagcagctacagctgcagtttggtggattggtggagtatgtgtgtgtgtcagtgctcagctaagaactgtagggaagatggatgaccttcacgcagaactccttttgggatatacatgatgcagaaaggatcctacatggagagagacagaactctctcagctgacactctcagagattcctgatgggctttctcttgaagtccaaaggcgtctgcattgtttcctttctttgcccatccatgaatgttctgttttgttttttttaataagaattccggctgatttttgtgaggcctgtttaaattgactttactttgccttttgtgtttctcaattttatctagaaatctttctgactttttccatctcttgcttcaaagtaagaggggaactctccttgccgactccaccttataggtacatttggtgttttgcactgggaagaaataggatccatccttagctgaggcttgaggactgatccagcctctcatggcttccctccaaagtaacttagggttgagggatctatatgtgatgtcaaaacttactttaaacctctagtttcgtgctgtcatttattaggctgggccaccaaatctttgtttcaatttatcagaagccaagtgcatactagcgtcttgtttgttgcccattgcctatacttttcacctgagatgtgtgagttggggccttttaaaaactactgaattgtctgagccttgaagacatttccagggagaagagataatctctcatttcacccacaggctggtctaatcataacctagttaaagatgtccttgtttaagaaccccattatttatttttagtttttaatataaattaacatgtgggtcattatatttctccttaaatgaggaaattttaaattttattgatctaacctttgaagctttaaaaaaggagaaagagggtaggggtgggaaactggcatactgtgtgtatagcactgccgattggctaggccactgtgtctctgctacaaattaaagaaatcctaaaagttttccttggtcatagagttggggaatgacagaatttttctttgttgtgaaatgtatgtacagagtagaccatctctagccctgtggtgaaagaggtacactcgaatgtttgcataaagcaagtgacaaatgaaaaaaaaaaaaaaaa

SEQ ID NO: 186 - protein, 993 aa, Homo sapiens
MAAEWASRFWLWATLLIPAAAVYEDQVGKFDWRQQYVGKVKFASLEFSPGSKKLVVATEKNVIAALNSRTGEILWRHVDKGTAEGAVDAMLLHGQDVITVSNGGRIMRSWETNIGGLNWEITLDSGSFQALGLVGLQESVRYIAVLKKTTLALHHLSSGHLKWVEHLPESDSIHYQMVYSYGSGVVWALGVVPFSHVNIVKFNVEDGEIVQQVRVSTPWLQHLSGACGVVDEAVLVCPDPSSRSLQTLALETEWELRQIPLQSLDLEFGSGFQPRVLPTQPNPVDASRAQFFLHLSPSHYALLQYHYGTLSLLKNFPQTALVSFATTGEKTVAAVMACRNEVQKSSSSEDGSMGSFSEKSSSKDSLACFNQTYTINLYLVETGRRLLDTTITFSLEQSGTRPERLYIQVFLKKDDSVGYRALVQTEDHLLLFLQQLAGKVVLWSREESLAEVVCLEMVDLPLTGAQAELEGEFGKKADGLLGMFLKRLSSQLILLQAWTSHLWKMFYDARKPRSQIKNEINIDTLARDEFNLQKMMVMVTASGKLFGIESSSGTILWKQYLPNVKPDSSFKLMVQRTTAHFPHPPQCTLLVKDKESGMSSLYVFNPIFGKWSQVAPPVLKRPILQSLLLPVMDQDYAKVLLLIDDEYKVTAFPATRNVLRQLHELAPSIFFYLVDAEQGRLCGYRLRKDLTTELSWELTIPPEVQRIVKVKGKRSSEHVHSQGRVMGDRSVLYKSLNPNLLAVVTESTDAHHERTFIGIFLIDGVTGRIIHSSVQKKAKGPVHIVHSENWVVYQYWNTKARRNEFTVLELYEGTEQYNATAFSSLDRPQLPQVLQQSYIFPSSISAMEATITERGITSRHLLIGLPSGAILSLPKALLDPRRPEIPTEQSREENLIPYSPDVQIHAERFINYNQTVSRMRGIYTAPSGLESTCLVVAYGLDIYQTRVYPSKQFDVLKDDYDYVLISSVLFGLVFATMITKRLAQVKLLNRAWR

SEQ ID NO: 187 - DNA, 2914 bp, Homo sapiens
acccagtgagcggctagggtgcagcaggagtttgggggatagccccagtcttgggatctctgtcctgggctggggactgccccctcccctggcctggctcctgacgcccgtgctgccggtgaaacgctgttgacatgtcctgaattattaagcgtggggagggctccggagcacatgctgagcggagcggctggggctgcgcggcgtggcggagcagcgctcgctccctcgctcactcgctcgctcgcagggacacacgcaggggctgacagctgtgctggtgctgataagggaagccacaaggagacgatcgaggagagagacaagcggcagcagaggcagcagcggcagaggcagcaccagggctgcggagctgctgggagtgggagtgactcccccacctcgggcccccaccctgtccctgtcctcttcccgcttgccctgagtttagaagagcagccgctgccaccactgccactcgggagggcaccagggctgctggctagggagggacagggcagggaggctctggccagtcccagcagccggggacagatgccgatcgagattgtgtgcaaaatcaaatttgctgaggaggatgcgaaacccaaggagaaggaggcaggggatgagcagagcctcctcggggctgttgcccctggagcagccccccgagacctggccacctttgccagcaccagcaccctgcatggactgggccgggcctgtggcccaggcccccacggactgcgcagaaccctgtgggcactggccctactcacctcgctggctgccttcctgtaccaggcggctggcctggcccggggctacctgacccggcctcacctggtggcaatggaccccgctgccccagccccagtggcgggcttcccggctgtcaccctctgcaatatcaaccgcttccggcattcggcactcagcgatgccgacatcttccacctggccaatctgacagggctgccccccaaagaccgggatgggcaccgtgcggctggcctgcgctacccagagcctgacatggtagacatcctcaaccgcactggccaccagctcgccgacatgcttaagagctgcaacttcagtgggcatcactgctccgccagcaacttctctgtggtctatactcgctatgggaagtgttacaccttcaacgcggacccgcggagctcgctgcccagccgggcagggggcatgggcagtggcctggagatcatgctggacatccagcaggaggagtacctgcccatctggagggagacaaatgagacgtcgtttgaggcaggtattcgggtgcagatccacagccaggaggagccgccctacatccaccagctggggttcggggtgtccccaggcttccagacctttgtgtcctgccaggaacagcggctgacctacctgccccagccctggggcaactgccgcgcagagagtgagctcagggagcctgagcttcagggctactcggcctacagtgtgtctgcctgccggctgcgctgtgaaaaggaggccgtgcttcagcgctgccactgccggatggtgcacatgccaggcaatgagaccatctgcccaccaaatatctacatcgagtgtgcagaccacacactggactccctgggtgggggccctgagggcccgtgcttctgccccaccccctgcaacctgacacgctatgggaaagagatctccatggtcaggatccccaacaggggctcagcccggtacctggcgaggaagtacaaccgcaacgagacctacatacgggagaacttcctggtcctagatgtcttctttgaggccctgacctctgaagccatggagcagcgagcagcctatggcctgtcagccctgctgggagacctcgggggacagatgggcctgttcattggggccagcatcctcacgttgctggagatcctcgactacatctatgaggtgtcctgggatcgactgaagcgggtatggaggcgtcccaagacccccctgcggacctccactgggggcatctccactttggggcttcaggagctgaaggaacagagtccctgcccgagccggggccgagtggagggtgggggggtcagcagtctgctccccaatcaccaccacccccacggtcccccaggaggtctctttgaagattttgcttgctaggacggtgctgtgactgaaaggacccaggagtctgggacccctcctgggatccccagcacattctcctgctcctgggagaggcctgggggcggtgctcactgggagggccaggactcagttcctgctctcatcctcccctgccctgatgtcagctgctttgcacaaaggtccttcttgtccacaccccttatccccaggctggtgccccgggagggctggagaccaggccatgggccctcacggagaggaagggaaggaaggagagggagggggaggatagagcccatcccagccggggagggggagccctctgtacatttgtaaatatttagggaaagccgggtggggggaggggatacagatgtagaaggtgggtagggctacaggggtgggtgatttagggacagccagggtcccagccccaatgtcagcaggatagggagagccccaggactcaggagtgctgggctggtcctacttcctgcccctctccaggcccagctcccctcttggcagggggagaggatggcccagcaggcctggcccagctcccagttccccctgcaccagccccacccctagagtcccttctatagggagggggcaggagaccttccagacttcggctgagcttggagggtgggaagggagccttctcagtcctctctccctccagtctgattttataaagtgctgacgagattgggaataaagaggcataaagaaaaaaaaaaaaaaa

SEQ ID NO: 188 - protein, 647 aa, Homo sapiens
MLSGAAGAARRGGAALAPSLTRSLAGTHAGADSCAGADKGSHKETIEERDKRQQRQQRQRQHQGCGAAGSGSDSPTSGPHPVPVLFPLALSLEEQPLPPLPLGRAPGLLAREGQGREALASPSSRGQMPIEIVCKIKFAEEDAKPKEKEAGDEQSLLGAVAPGAAPRDLATFASTSTLHGLGRACGPGPHGLRRTLWALALLTSLAAFLYQAAGLARGYLTRPHLVAMDPAAPAPVAGFPAVTLCNINRFRHSALSDADIFHLANLTGLPPKDRDGHRAAGLRYPEPDMVDILNRTGHQLADMLKSCNFSGHHCSASNFSVVYTRYGKCYTFNADPRSSLPSRAGGMGSGLEIMLDIQQEEYLPIWRETNETSFEAGIRVQIHSQEEPPYIHQLGFGVSPGFQTFVSCQEQRLTYLPQPWGNCRAESELREPELQGYSAYSVSACRLRCEKEAVLQRCHCRMVHMPDSLGGGPEGPCFCPTPCNLTRYGKEISMVRIPNRGSARYLARKYNRNETYIRENFLVLDVFFEALTSEAMEQRAAYGLSALLGDLGGQMGLFIGASILTLLEILDYIYEVSWDRLKRVWRRPKTPLRTSTGGISTLGLQELKEQSPCPSRGRVEGGGVSSLLPNHHHPHGPPGGLFEDFAC

SEQ ID NO: 189 - DNA, 7639 bp, Homo sapiens
tttctgttatttgtccccgtccctccccacccccctgctgaagcgagaataagggcagggaccgcggctcctacctcttggtgatccccttccccattccgcccccgcctcaacgcccagcacagtgccctgcacacagtagtcgctcaataaatgttcgtggatgatgatgatgatgatgatgaaaaaaatgcagcatcaacggcagcagcaagcggaccacgcgaacgaggcaaactatgcaagaggcaccagacttcctctttctggtgaaggaccaacttctcagccgaatagctccaagcaaactgtcctgtcttggcaagctgcaatcgatgctgctagacaggccaaggctgcccaaactatgagcacctctgcacccccacctgtaggatctctctcccaaagaaaacgtcagcaatacgccaagagcaaaaaacagggtaactcgtccaacagccgacctgcccgcgcccttttctgtttatcactcaataaccccatccgaagagcctgcattagtatagtggaatggaaaccatttgacatatttatattattggctatttttgccaattgtgtggccttagctatttacatcccattccctgaagatgattctaattcaacaaatcataacttggaaaaagtagaatatgccttcctgattatttttacagtcgagacatttttgaagattatagcgtatggattattgctacatcctaatgcttatgttaggaatggatggaatttactggattttgttatagtaatagtaggattgtttagtgtaattttggaacaattaaccaaagaaacagaaggcgggaaccactcaagcggcaaatctggaggctttgatgtcaaagccctccgtgcctttcgagtgttgcgaccacttcgactagtgtcaggagtgcccagtttacaagttgtcctgaactccattataaaagccatggttcccctccttcacatagcccttttggtattatttgtaatcataatctatgctattataggattggaactttttattggaaaaatgcacaaaacatgtttttttgctgactcagatatcgtagctgaagaggacccagctccatgtgcgttctcagggaatggacgccagtgtactgccaatggcacggaatgtaggagtggctgggttggcccgaacggaggcatcaccaactttgataactttgcctttgccatgcttactgtgtttcagtgcatcaccatggagggctggacagatgtgctctactggatgaatgatgctatgggatttgaattgccctgggtgtattttgtcagtctcgtcatctttgggtcatttttcgtactaaatcttgtacttggtgtattgagcggagaattctcaaaggaaagagagaaggcaaaagcacggggagatttccagaagctccgggagaagcagcagctggaggaggatctaaagggctacttggattggatcacccaagctgaggacatcgatccggagaatgaggaagaaggaggagaggaaggcaaacgaaatactagcatgcccaccagcgagactgagtctgtgaacacagagaacgtcagcggtgaaggcgagaaccgaggctgctgtggaagtctctgtcaagccatctcaaaatccaaactcagccgacgctggcgtcgctggaaccgattcaatcgcagaagatgtagggccgccgtgaagtctgtcacgttttactggctggttatcgtcctggtgtttctgaacaccttaaccatttcctctgagcactacaatcagccagattggttgacacagattcaagatattgccaacaaagtcctcttggctctgttcacctgcgagatgctggtaaaaatgtacagcttgggcctccaagcatatttcgtctctcttttcaaccggtttgattgcttcgtggtgtgtggtggaatcactgagacgatcttggtggaactggaaatcatgtctcccctggggatctctgtgtttcggtgtgtgcgcctcttaagaatcttcaaagtgaccaggcactggacttccctgagcaacttagtggcatccttattaaactccatgaagtccatcgcttcgctgttgcttctgctttttctcttcattatcatcttttccttgcttgggatgcagctgtttggcggcaagtttaattttgatgaaacgcaaaccaagcggagcacctttgacaatttccctcaagcacttctcacagtgttccagatcctgacaggcgaagactggaatgctgtgatgtacgatggcatcatggcttacgggggcccatcctcttcaggaatgatcgtctgcatctacttcatcatcctcttcatttgtggtaactatattctactgaatgtcttcttggccatcgctgtagacaatttggctgatgctgaaagtctgaacactgctcagaaagaagaagcggaagaaaaggagaggaaaaagattgccagaaaagagagcctagaaaataaaaagaacaacaaaccagaagtcaaccagatagccaacagtgacaacaaggttacaattgatgactatagagaagaggatgaagacaaggacccctatccgccttgcgatgtgccagtaggggaagaggaagaggaagaggaggaggatgaacctgaggttcctgccggaccccgtcctcgaaggatctcggagttgaacatgaaggaaaaaattgcccccatccctgaagggagcgctttcttcattcttagcaagaccaacccgatccgcgtaggctgccacaagctcatcaaccaccacatcttcaccaacctcatccttgtcttcatcatgctgagcagcgctgccctggccgcagaggaccccatccgcagccactccttccggaacacgatactgggttactttgactatgccttcacagccatctttactgttgagatcctgttgaagatgacaacttttggagctttcctccacaaaggggccttctgcaggaactacttcaatttgctggatatgctggtggttggggtgtctctggtgtcatttgggattcaatccagtgccatctccgttgtgaagattctgagggtcttaagggtcctgcgtcccctcagggccatcaacagagcaaaaggacttaagcacgtggtccagtgcgtcttcgtggccatccggaccatcggcaacatcatgatcgtcaccaccctcctgcagttcatgtttgcctgtatcggggtccagttgttcaaggggaagttctatcgctgtacggatgaagccaaaagtaaccctgaagaatgcaggggacttttcatcctctacaaggatggggatgttgacagtcctgtggtccgtgaacggatctggcaaaacagtgatttcaacttcgacaacgtcctctctgctatgatggcgctcttcacagtctccacgtttgagggctggcctgcgttgctgtataaagccatcgactcgaatggagagaacatcggcccaatctacaaccaccgcgtggagatctccatcttcttcatcatctacatcatcattgtagctttcttcatgatgaacatctttgtgggctttgtcatcgttacatttcaggaacaaggagaaaaagagtataagaactgtgagctggacaaaaatcagcgtcagtgtgttgaatacgccttgaaagcacgtcccttgcggagatacatccccaaaaacccctaccagtacaagttctggtacgtggtgaactcttcgcctttcgaatacatgatgtttgtcctcatcatgctcaacacactctgcttggccatgcagcactacgagcagtccaagatgttcaatgatgccatggacattctgaacatggtcttcaccggggtgttcaccgtcgagatggttttgaaagtcatcgcatttaagcctaaggggtattttagtgacgcctggaacacgtttgactccctcatcgtaatcggcagcattatagacgtggccctcagcgaagcagacaactctgaagagagcaatagaatctccatcacctttttccgtcttttccgagtgatgcgattggtgaagcttctcagcaggggggaaggcatccggacattgctgtggacttttattaagtcctttcaggcgctcccgtatgtggccctcctcatagccatgctgttcttcatctatgcggtcattggcatgcagatgtttgggaaagttgccatgagagataacaaccagatcaataggaacaataacttccagacgtttccccaggcggtgctgctgctcttcaggtgtgcaacaggtgaggcctggcaggagatcatgctggcctgtctcccagggaagctctgtgaccctgagtcagattacaaccccggggaggagtatacatgtgggagcaactttgccattgtctatttcatcagtttttacatgctctgtgcatttctgatcatcaatctgtttgtggctgtcatcatggataatttcgactatctgacccgggactggtctattttggggcctcaccatttagatgaattcaaaagaatatggtcagaatatgaccctgaggcaaagggaaggataaaacaccttgatgtggtcactctgcttcgacgcatccagcctcccctggggtttgggaagttatgtccacacagggtagcgtgcaagagattagttgccatgaacatgcctctcaacagtgacgggacagtcatgtttaatgcaaccctgtttgctttggttcgaacggctcttaagatcaagaccgaagggaacctggagcaagctaatgaagaacttcgggctgtgataaagaaaatttggaagaaaaccagcatgaaattacttgaccaagttgtccctccagctggtgatgatgaggtaaccgtggggaagttctatgccactttcctgatacaggactactttaggaaattcaagaaacggaaagaacaaggactggtgggaaagtaccctgcgaagaacaccacaattgccctacaggcgggattaaggacactgcatgacattgggccagaaatccggcgtgctatatcgtgtgatttgcaagatgacgagcctgaggaaacaaaacgagaagaagaagatgatgtgttcaaaagaaatggtgccctgcttggaaaccatgtcaatcatgttaatagtgataggagagattcccttcagcagaccaataccacccaccgtcccctgcatgtccaaaggccttcaattccacctgcaagtgatactgagaaaccgctgtttcctccagcaggaaattcggtgtgtcataaccatcataaccataattccataggaaagcaagttcccacctcaacaaatgccaatctcaataatgccaatatgtccaaagctgcccatggaaagcggcccagcattgggaaccttgagcatgtgtctgaaaatgggcatcattcttcccacaagcatgaccgggagcctcagagaaggtccagtgtgaaaaggtccgactcaggagatgaacagctcccaactatttgccgggaagacccagagatacatggctatttcagggacccccactgcttgggggagcaggagtatttcagtagtgaggaatgctacgaggatgacagctcgcccacctggagcaggcaaaactatggctactacagcagatacccaggcagaaacatcgactctgagaggccccgaggctaccatcatccccaaggattcttggaggacgatgactcgcccgtttgctatgattcacggagatctccaaggagacgcctactacctcccaccccagcatcccaccggagatcctccttcaactttgagtgcctgcgccggcagagcagccaggaagaggtcccgtcgtctcccatcttcccccatcgcacggccctgcctctgcatctaatgcagcaacagatcatggcagttgccggcctagattcaagtaaagcccagaagtactcaccgagtcactcgacccggtcgtgggccacccctccagcaacccctccctaccgggactggacaccgtgctacacccccctgatccaagtggagcagtcagaggccctggaccaggtgaacggcagcctgccgtccctgcaccgcagctcctggtacacagacgagcccgacatctcctaccggactttcacaccagccagcctgactgtccccagcagcttccggaacaaaaacagcgacaagcagaggagtgcggacagcttggtggaggcagtcctgatatccgaaggcttgggacgctatgcaagggacccaaaatttgtgtcagcaacaaaacacgaaatcgctgatgcctgtgacctcaccatcgacgagatggagagtgcagccagcaccctgcttaatgggaacgtgcgtccccgagccaacggggatgtgggccccctctcacaccggcaggactatgagctacaggactttggtcctggctacagcgacgaagagccagaccctgggagggatgaggaggacctggcggatgaaatgatatgcatcaccaccttgtagcccccagcgaggggcagactggctctggcctcaggtggggcgcaggagagccaggggaaaagtgcctcatagttaggaaagtttaggcactagttgggagtaatattcaattaattagacttttgtataagagatgtcatgcctcaagaaagccataaacctggtaggaacaggtcccaagcggttgagcctggcagagtaccatgcgctcggccccagctgcaggaaacagcaggccccgccctctcacagaggatgggtgaggaggccagacctgccctgccccattgtccagatgggcactgctgtggagtctgcttctcccatgtaccagggcaccaggcccacccaactgaaggcatggcggcggggtgcaggggaaagttaaaggtgatgacgatcatcacacctgtgtcgttacctcagccatcggtctagcatatcagtcactgggcccaacatatccatttttaaaccctttcccccaaatacactgcgtcctggttcctgtttagctgttctgaaatacggtgtgtaagtaagtcagaacccagctaccagtgattattgcgagggcaatgggacctcataaataaggttttctgtgatgtgacgccagtttacataagagaatatcactccgatggtcggtttctgactgtcacgctaagggcaactgtaaactggaataataatgcactcgcaaccaggtaaacttagatacactagtttgtttaaaattatagatttactgtacatgacttgtaatatactataatttgtatttgtaaagagatggtctatattttgtaattactgtattgtatttgaactgcagcaatatccatgggtcctaataattgtagttccccactaaaatctagaaattattagtatttttactcgggctatccagaagtagaagaaatagagccaattctcatttattcagcgaaaatcctctggggttaaaattttaagtttgaaagaacttgacactacagaaatttttctaaaatattttgagtcactataaacctatcatctttccacaagataaaa

SEQ ID NO: 190 - protein, 2161 aa, Homo sapiens
MMMMMMMKKMQHQRQQQADHANEANYARGTRLPLSGEGPTSQPNSSKQTVLSWQAAIDAARQAKAAQTMSTSAPPPVGSLSQRKRQQYAKSKKQGNSSNSRPARALFCLSLNNPIRRACISIVEWKPFDIFILLAIFANCVALAIYIPFPEDDSNSTNHNLEKVEYAFLIIFTVETFLKIIAYGLLLHPNAYVRNGWNLLDFVIVIVGLFSVILEQLTKETEGGNHSSGKSGGFDVKALRAFRVLRPLRLVSGVPSLQVVLNSIIKAMVPLLHIALLVLFVIIIYAIIGLELFIGKMHKTCFFADSDIVAEEDPAPCAFSGNGRQCTANGTECRSGWVGPNGGITNFDNFAFAMLTVFQCITMEGWTDVLYWMNDAMGFELPWVYFVSLVIFGSFFVLNLVLGVLSGEFSKEREKAKARGDFQKLREKQQLEEDLKGYLDWITQAEDIDPENEEEGGEEGKRNTSMPTSETESVNTENVSGEGENRGCCGSLCQAISKSKLSRRWRRWNRFNRRRCRAAVKSVTFYWLVIVLVFLNTLTISSEHYNQPDWLTQIQDIANKVLLALFTCEMLVKMYSLGLQAYFVSLFNRFDCFVVCGGITETILVELEIMSPLGISVFRCVRLLRIFKVTRHWTSLSNLVASLLNSMKSIASLLLLLFLFIIIFSLLGMQLFGGKFNFDETQTKRSTFDNFPQALLTVFQILTGEDWNAVMYDGIMAYGGPSSSGMIVCIYFIILFICGNYILLNVFLAIAVDNLADAESLNTAQKEEAEEKERKKIARKESLENKKNNKPEVNQIANSDNKVTIDDYREEDEDKDPYPPCDVPVGEEEEEEEEDEPEVPAGPRPRRISELNMKEKIAPIPEGSAFFILSKTNPIRVGCHKLINHHIFTNLILVFIMLSSAALAAEDPIRSHSFRNTILGYFDYAFTAIFTVEILLKMTTFGAFLHKGAFCRNYFNLLDMLVVGVSLVSFGIQSSAISVVKILRVLRVLRPLRAINRAKGLKHVVQCVFVAIRTIGNIMIVTTLLQFMFACIGVQLFKGKFYRCTDEAKSNPEECRGLFILYKDGDVDSPVVRERIWQNSDFNFDNVLSAMMALFTVSTFEGWPALLYKAIDSNGENIGPIYNHRVEISIFFIIYIIIVAFFMMNIFVGFVIVTFQEQGEKEYKNCELDKNQRQCVEYALKARPLRRYIPKNPYQYKFWYVVNSSPFEYMMFVLIMLNTLCLAMQHYEQSKMFNDAMDILNMVFTGVFTVEMVLKVIAFKPKGYFSDAWNTFDSLIVIGSIIDVALSEADPTESENVPVPTATPGNSEESNRISITFFRLFRVMRLVKLLSRGEGIRTLLWTFIKSFQALPYVALLIAMLFFIYAVIGMQMFGKVAMRDNNQINRNNNFQTFPQAVLLLFRCATGEAWQEIMLACLPGKLCDPESDYNPGEEYTCGSNFAIVYFISFYMLCAFLIINLFVAVIMDNFDYLTRDWSILGPHHLDEFKRIWSEYDPEAKGRIKHLDVVTLLRRIQPPLGFGKLCPHRVACKRLVAMNMPLNSDGTVMFNATLFALVRTALKIKTEGNLEQANEELRAVIKKIWKKTSMKLLDQVVPPAGDDEVTVGKFYATFLIQDYFRKFKKRKEQGLVGKYPAKNTTIALQAGLRTLHDIGPEIRRAISCDLQDDEPEETKREEEDDVFKRNGALLGNHVNHVNSDRRDSLQQTNTTHRPLHVQRPSIPPASDTEKPLFPPAGNSVCHNHHNHNSIGKQVPTSTNANLNNANMSKAAHGKRPSIGNLEHVSENGHHSSHKHDREPQRRSSVKRTRYYETYIRSDSGDEQLPTICREDPEIHGYFRDPHCLGEQEYFSSEECYEDDSSPTWSRQNYGYYSRYPGRNIDSERPRGYHHPQGFLEDDDSPVCYDSRRSPRRRLLPPTPASHRRSSFNFECLRRQSSQEEVPSSPIFPHRTALPLHLMQQQIMAVAGLDSSKAQKYSPSHSTRSWATPPATPPYRDWTPCYTPLIQVEQSEALDQVNGSLPSLHRSSWYTDEPDISYRTFTPASLTVPSSFRNKNSDKQRSADSLVEAVLISEGLGRYARDPKFVSATKHEIADACDLTIDEMESAASTLLNGNVRPRANGDVGPLSHRQDYELQDFGPGYSDEEPDPGRDEEDLADEMICITTL

SEQ ID NO: 191 - DNA, 8305 bp, Homo sapiens
gcgcccaggagcagagccgcgctcgctccactcagctcccagctcccaggactccgctggctcctcgcaagtcctgccgcccagcccgccgggatgcagtccgggccgcggcccccacttccagcccccggcctggccttggctttgaccctgactatgttggccagacttgcatccgcggcttccttcttcggtgagaaccacctggaggtgcctgtggccacggctctgaccgacatagacctgcagctgcagttctccacgtcccagcccgaagccctccttctcctggcagcaggcccagctgaccacctcctgctgcagctctactctggacgcctgcaggtcagacttgttctgggccaggaggagctgaggctgcagactccagcagagacgctgctgagtgactccatcccccacactgtggtgctgactgtcgtagagggctgggccacgttgtcagtcgatgggtttctgaacgcctcctcagcagtcccaggagcccccctagaggtcccctatgggctctttgttgggggcactgggacccttggcctgccctacctgaggggaaccagccgacccctgaggggttgcctccatgcagccaccctcaatggccgcagcctcctccggcctctgacccccgatgtgcatgagggctgtgctgaagagttttctgccagtgatgatgtggccctgggcttctctgggccccactctctggctgccttccctgcctggggcactcaggacgaaggaaccctagagtttacactcaccacacagagccggcaggcacccttggccttccaggcagggggccggcgtggggacttcatctatgtggacatatttgagggccacctgcgggccgtggtggagaagggccagggtaccgtattgctccacaacagtgtgcctgtggccgatgggcagccccatgaggtcagtgtccacatcaatgctcaccggctggaaatctccgtggaccagtaccctacgcatacttcgaaccgaggagtcctcagctacctggagccacggggcagtctccttctcggggggctggatgcagaggcctctcgtcacctccaggaacaccgcctgggcctgacaccagaggccaccaatgcctccctgctgggctgcatggaagacctcagtgtcaatggccagaggcgggggctgcgggaagctttgctgacgcgcaacatggcagccggctgcaggctggaggaggaggagtatgaggacgatgcctatggacattatgaagctttctccaccctggcccctgaggcttggccagccatggagctgcctgagccatgcgtgcctgagccagggctgcctcctgtctttgccaatttcacccagctgctgactatcagcccactggtggtggccgaggggggcacagcctggcttgagtggaggcatgtgcagcccacgctggacctgatggaggctgagctgcgcaaatcccaggtgctgttcagcgtgacccgaggggcacgccatggcgagctcgagctggacatcccgggagcccaggcacgaaaaatgttcaccctcctggacgtggtgaaccgcaaggcccgcttcatccacgatggctctgaggacacctccgaccagctggtgctggaggtgtcggtgacggctcgggtgcccatgccctcatgccttcggaggggccaaacatacctcctgcccatccaggtcaaccctgtcaatgacccaccccacatcatcttcccacatggcagcctcatggtgatcctggaacacacgcagaagccgctggggcctgaggttttccaggcctatgacccggactctgcctgtgagggcctcaccttccaggtccttggcacctcctctggcctccccgtggagcgccgagaccagcctggggagccggcgaccgagttctcctgccgggagttggaggccggcagcctagtctatgtccaccgcggtggtcctgcacaggacttgacgttccgggtcagcgatggactgcaggccagccccccggccacgctgaaggtggtggccatccggccggccatacagatccaccgcagcacagggttgcgactggcccaaggctctgccatgcccatcttgcccgccaacctgtcggtggagaccaatgccgtggggcaggatgtgagcgtgctgttccgcgtcactggggccctgcagtttggggagctgcagaagcagggggcaggtggggtggagggtgctgagtggtgggccacacaggcgttccaccagcgggatgtggagcagggccgcgtgaggtacctgagcactgacccacagcaccacgcttacgacaccgtggagaacctggccctggaggtgcaggtgggccaggagatcctgagcaatctgtccttcccagtgaccatccagagagccactgtgtggatgctgcggctggagccactgcacactcagaacacccagcaggagaccctcaccacagcccacctggaggccaccctggaggaggcaggcccaagccccccaaccttccattatgaggtggttcaggctcccaggaaaggcaaccttcaactacagggcacaaggctgtcagatggccagggcttcacccaggatgacatacaggctggccgggtgacctatggggccacagcacgtgcctcagaggcagtcgaggacaccttccgtttccgtgtcacagctccaccatatttctccccactctataccttccccatccacattggtggtgacccagatgcgcctgtcctcaccaatgtcctcctcgtggtgcctgagggtggtgagggtgtcctctctgctgaccacctctttgtcaagagtctcaacagtgccagctacctctatgaggtcatggagcggccccgccatgggaggttggcttggcgtgggacacaggacaagaccactatggtgacatccttcaccaatgaagacctgttgcgtggccggctggtctaccagcatgatgactccgagaccacagaagatgatatcccatttgttgctacccgccagggcgagagcagtggtgacatggcctgggaggaggtacggggtgtcttccgagtggccatccagcccgtgaatgaccacgcccctgtgcagaccatcagccggatcttccatgtggcccggggtgggcggcggctgctgactacagacgacgtggccttcagcgatgctgactcgggctttgctgacgcccagctggtgcttacccgcaaggacctcctctttggcagtatcgtggccgtagatgagcccacgcggcccatctaccgcttcacccaggaggacctcaggaagaggcgagtactgttcgtgcactcaggggctgaccgtggctggatccagctgcaggtgtccgacgggcaacaccaggccactgcgctgctggaggtgcaggcctcggaaccctacctccgtgtggccaacggctccagccttgtggtccctcaaggaggccagggcaccatcgacacggccgtgctccacctggacaccaacctcgacatccgcagtggggatgaggtccactaccacgtcacagctggccctcgctggggacagctagtccgggctggtcagccagccacagccttctcccagcaggacctgctggatggggccgttctctatagccacaatggcagcctcagcccccgcgacaccatggccttctccgtggaagcagggccagtgcacacggatgccaccctacaagtgaccattgccctagagggcccactggccccactgaagctggtccggcacaagaagatctacgtcttccagggagaggcagctgagatcagaagggaccagctggaggcagcccaggaggcagtgccacctgcagacatcgtattctcagtgaagagcccaccgagtgccggctacctggtgatggtgtcgcgtggcgccttggcagatgagccacccagcctggaccctgtgcagagcttctcccaggaggcagtggacacaggcagggtcctgtacctgcactcccgccctgaggcctggagcgatgccttctcgctggatgtggcctcaggcctgggtgctcccctcgagggcgtccttgtggagctggaggtgctgcccgctgccatcccactagaggcgcaaaacttcagcgtccctgagggtggcagcctcaccctggcccctccactgctccgtgtctccgggccctacttccccactctcctgggcctcagcctgcaggtgctggagccaccccagcatggagccctgcagaaggaggacggacctcaagccaggaccctcagcgccttctcctggagaatggtggaagagcagctgatccgctacgtgcatgacgggagcgagacactgacagacagttttgtcctgatggctaatgcctccgagatggatcgccagagccatcctgtggccttcactgtcactgtcctgcctgtcaatgaccaaccccccatcctcactacaaacacaggcctgcagatgtgggagggggccactgcgcccatccctgcggaggctctgaggagcacggacggcgactctgggtctgaggatctggtctacaccatcgagcagcccagcaacgggcgggtagtgctgcggggggcgccgggcactgaggtgcgcagcttcacgcaggcccagctggacggcgggctcgtgctgttctcacacagaggaaccctggatggaggcttccgcttccgcctctctgacggcgagcacacttcccccggacacttcttccgagtgacggcccagaagcaagtgctcctctcgctgaagggcagccagacactgactgtctgcccagggtccgtccagccactcagcagtcagaccctcagggccagctccagcgcaggcactgacccccagctcctgctctaccgtgtggtgcggggcccccagctaggccggctgttccacgcccagcaggacagcacaggggaggccctggtgaacttcactcaggcagaggtctacgctgggaatattctgtatgagcatgagatgccccccgagcccttttgggaggcccatgataccctagagctccagctgtcctcgccgcctgcccgggacgtggccgccacccttgctgtggctgtgtcttttgaggctgcctgtccccagcgccccagccacctctggaagaacaaaggtctctgggtccccgagggccagcgggccaggatcaccgtggctgctctggatgcctccaatctcttggccagcgttccatcaccccagcgctcagagcatgatgtgctcttccaggtcacacagttccccagccggggccagctgttggtgtccgaggagcccctccatgctgggcagccccacttcctgcagtcccagctggctgcagggcagctagtgtatgcccacggcggtgggggcacccagcaggatggcttccactttcgtgcccacctccaggggccagcaggggcctccgtggctggaccccaaacctcagaggcctttgccatcacggtgagggatgtaaatgagcggccccctcagccacaggcctctgtcccactccggctcacccgaggctctcgtgcccccatctcccgggcccagctgagtgtggtggacccagactcagctcctggggagattgagtacgaggtccagcgggcaccccacaacggcttcctcagcctggtgggtggtggcctggggcccgtgacccgcttcacgcaagccgatgtggattcagggcggctggccttcgtggccaacgggagcagcgtggcaggcatcttccagctgagcatgtctgatggggccagcccacccctgcccatgtccctggctgtggacatcctaccatccgccatcgaggtgcagctgcgggcacccctggaggtgccccaagctttggggcgctcctcactgagccagcagcagctccgggtggtttcagatcgggaggagccagaggcagcataccgcctcatccagggaccccagtatgggcatctcctggtgggcgggcggcccacctcggccttcagccaattccagatagaccagggcgaggtggtctttgccttcaccaacttctcctcctctcatgaccacttcagagtcctggcactggctaggggtgtcaatgcatcagccgtagtgaacgtcactgtgagggctctgctgcatgtgtgggcaggtgggccatggccccagggtgccaccctgcgcctggaccccaccgtcctagatgctggcgagctggccaaccgcacaggcagtgtgccgcgcttccgcctcctggagggaccccggcatggccgcgtggtccgcgtgccccgagccaggacggagcccgggggcagccagctggtggagcagttcactcagcaggaccttgaggacgggaggctggggctggaggtgggcaggccagaggggagggcccccggccccgcaggtgacagtctcactctggagctgtgggcacagggcgtcccgcctgctgtggcctccctggactttgccactgagccttacaatgctgcccggccctacagcgtggccctgctcagtgtccccgaggccgcccggacggaagcagggaagccagagagcagcacccccacaggcgagccaggccccatggcatccagccctgagcccgctgtggccaagggaggcttcctgagcttccttgaggccaacatgttcagcgtcatcatccccatgtgcctggtacttctgctcctggcgctcatcctgcccctgctcttctacctccgaaaacgcaacaagacgggcaagcatgacgtccaggtcctgactgccaagccccgcaacggcctggctggtgacaccgagacctttcgcaaggtggagccaggccaggccatcccgctcacagctgtgcctggccaggggccccctccaggaggccagcctgacccagagctgctgcagttctgccggacacccaaccctgcccttaagaatggccagtactgggtgtgaggcctggcctgggcccagatgctgatcgggccagggacaggcttgcccatgtcccgggccccattgcttccatgcctggtgctgtctgagtatccccagagcaagagagacctggagacaccaggggtggagggtcctgggagatagtcccaggggtccgggacagagtggagtcaagagctggaacctccctcagctcactccgagcctggagaactgcaggggccaaggtggaggcaggcttaagttcagtcctcctgccctggagctggtttgggctgtcaaaaccagggtaacctcctacatgggtcatgactctgggtcctgggtctgtgaccttgggtaagtcgcgcctgacccaggctgctaagagggcaaggagaaggaagtaccctggggagggaagggacagaggaagctattcctggcttttccactccaacccaggccaccctttgtctctgccccagagttgagaaaaaaacttcctcccctggttttttagggagatggtatcccctggagtagagggcaagaggagagagcgcctccagtctagaaggcataagccaataggataatatattcagggtgcagggtgggtaggttgctctggggatgggtttatttaagggagattgcaaggaagctatttaacatggtgctgagctagccaggactgatggagcccctgggggtgtgggatggaggagggtctgcagccagttcattcccagggccccatcttgatgggccaagggctaaacatgcatgtgtcagtggctttggagcaggttaggctggggctcatcgagggtctcaggccgaggccactgcggtgccagtgcccccctgaggactagggcaggcagctgggggcacttggttccatggagcctggataaacagtgctttggaggctctggacagctgtgtggtgtttgtgtcttaactatgcactgggcccttgtctgcgtcggcttgcatacagagggcccctggggtcggccctccggcctggcctcagccagtgggatggacagggccaggcaggcctctgaacttccacctcctggggcctcccagacctcctgtgcccccacctgtgtgggcaggtgggccagtcttcgggtgatgggaccaaaccccttcagttcagtagagaaaggctaggtcctctacaaagagctgcaagacaaaaattaaaataaatgctccccaccctagaaaaaaaaaaaaaaaa

SEQ ID NO: 192 - protein, 2322 aa, Homo sapiens
MQSGPRPPLPAPGLALALTLTMLARLASAASFFGENHLEVPVATALTDIDLQLQFSTSQPEALLLLAAGPADHLLLQLYSGRLQVRLVLGQEELRLQTPAETLLSDSIPHTVVLTVVEGWATLSVDGFLNASSAVPGAPLEVPYGLFVGGTGTLGLPYLRGTSRPLRGCLHAATLNGRSLLRPLTPDVHEGCAEEFSASDDVALGFSGPHSLAAFPAWGTQDEGTLEFTLTTQSRQAPLAFQAGGRRGDFIYVDIFEGHLRAVVEKGQGTVLLHNSVPVADGQPHEVSVHINAHRLEISVDQYPTHTSNRGVLSYLEPRGSLLLGGLDAEASRHLQEHRLGLTPEATNASLLGCMEDLSVNGQRRGLREALLTRNMAAGCRLEEEEYEDDAYGHYEAFSTLAPEAWPAMELPEPCVPEPGLPPVFANFTQLLTISPLVVAEGGTAWLEWRHVQPTLDLMEAELRKSQVLFSVTRGARHGELELDIPGAQARKMFTLLDVVNRKARFIHDGSEDTSDQLVLEVSVTARVPMPSCLRRGQTYLLPIQVNPVNDPPHIIFPHGSLMVILEHTQKPLGPEVFQAYDPDSACEGLTFQVLGTSSGLPVERRDQPGEPATEFSCRELEAGSLVYVHRGGPAQDLTFRVSDGLQASPPATLKVVAIRPAIQIHRSTGLRLAQGSAMPILPANLSVETNAVGQDVSVLFRVTGALQFGELQKQGAGGVEGAEWWATQAFHQRDVEQGRVRYLSTDPQHHAYDTVENLALEVQVGQEILSNLSFPVTIQRATVWMLRLEPLHTQNTQQETLTTAHLEATLEEAGPSPPTFHYEVVQAPRKGNLQLQGTRLSDGQGFTQDDIQAGRVTYGATARASEAVEDTFRFRVTAPPYFSPLYTFPIHIGGDPDAPVLTNVLLVVPEGGEGVLSADHLFVKSLNSASYLYEVMERPRHGRLAWRGTQDKTTMVTSFTNEDLLRGRLVYQHDDSETTEDDIPFVATRQGESSGDMAWEEVRGVFRVAIQPVNDHAPVQTISRIFHVARGGRRLLTTDDVAFSDADSGFADAQLVLTRKDLLFGSIVAVDEPTRPIYRFTQEDLRKRRVLFVHSGADRGWIQLQVSDGQHQATALLEVQASEPYLRVANGSSLVVPQGGQGTIDTAVLHLDTNLDIRSGDEVHYHVTAGPRWGQLVRAGQPATAFSQQDLLDGAVLYSHNGSLSPRDTMAFSVEAGPVHTDATLQVTIALEGPLAPLKLVRHKKIYVFQGEAAEIRRDQLEAAQEAVPPADIVFSVKSPPSAGYLVMVSRGALADEPPSLDPVQSFSQEAVDTGRVLYLHSRPEAWSDAFSLDVASGLGAPLEGVLVELEVLPAAIPLEAQNFSVPEGGSLTLAPPLLRVSGPYFPTLLGLSLQVLEPPQHGALQKEDGPQARTLSAFSWRMVEEQLIRYVHDGSETLTDSFVLMANASEMDRQSHPVAFTVTVLPVNDQPPILTTNTGLQMWEGATAPIPAEALRSTDGDSGSEDLVYTIEQPSNGRVVLRGAPGTEVRSFTQAQLDGGLVLFSHRGTLDGGFRFRLSDGEHTSPGHFFRVTAQKQVLLSLKGSQTLTVCPGSVQPLSSQTLRASSSAGTDPQLLLYRVVRGPQLGRLFHAQQDSTGEALVNFTQAEVYAGNILYEHEMPPEPFWEAHDTLELQLSSPPARDVAATLAVAVSFEAACPQRPSHLWKNKGLWVPEGQRARITVAALDASNLLASVPSPQRSEHDVLFQVTQFPSRGQLLVSEEPLHAGQPHFLQSQLAAGQLVYAHGGGGTQQDGFHFRAHLQGPAGASVAGPQTSEAFAITVRDVNERPPQPQASVPLRLTRGSRAPISRAQLSVVDPDSAPGEIEYEVQRAPHNGFLSLVGGGLGPVTRFTQADVDSGRLAFVANGSSVAGIFQLSMSDGASPPLPMSLAVDILPSAIEVQLRAPLEVPQALGRSSLSQQQLRVVSDREEPEAAYRLIQGPQYGHLLVGGRPTSAFSQFQIDQGEVVFAFTNFSSSHDHFRVLALARGVNASAVVNVTVRALLHVWAGGPWPQGATLRLDPTVLDAGELANRTGSVPRFRLLEGPRHGRVVRVPRARTEPGGSQLVEQFTQQDLEDGRLGLEVGRPEGRAPGPAGDSLTLELWAQGVPPAVASLDFATEPYNAARPYSVALLSVPEAARTEAGKPESSTPTGEPGPMASSPEPAVAKGGFLSFLEANMFSVIIPMCLVLLLLALILPLLFYLRKRNKTGKHDVQVLTAKPRNGLAGDTETFRKVEPGQAIPLTAVPGQGPPPGGQPDPELLQFCRTPNPALKNGQYWV

SEQ ID NO: 193 - DNA, 4571 bp, Homo sapiens
gcagtcagagctgcctctcgccctcgctagctgggctcgcagcctcttcctccctccctggctcctggctttttgtttaaagcaacacccaccctccatccaggctttttttctttctttctttattggtagcggccaaaaagagttgattgctattgggatccgctgagtaaagacacgggcaggggtgcgcggaggtgagaaaactgaagacctggaagatttttttttccttcaaaaacccgtttccatccagtcttcagccagtccagtctactttaatcctcaccaggacaatggattaagtttctcttccctggaccagaagtcgggttcggacttggggcaaaatgaaggaaaaggccatgatcaagaccgctaagatgcaggggaacgtgatggagctggtggggagtaaccctccgcagaggaattggaaaggaatagcaattgcactgcttgtcattctggtcatctgctccttgatcgtcacctcggtcatacttctgacaccagcggaagataatagtctgtctcaaaagaagaaggtcactgtagaagatctcttcagtgaagacttcaaaattcatgaccccgaggctaagtggataagtgatacagaattcatctacagagaacagaaaggaacagtgagactgtggaatgttgaaacaaatacttctactgtcttaatagaaggcaaaaaaattgaatcattaagagccatcagatatgaaatatctccagatagagagtatgcacttttttcatacaatgtggaacccatatatcaacactcgtatactggatattacgtcctgagcaaaattcctcatggggatcctcaaagtctggacccaccagaagtcagcaatgcaaaacttcagtatgcaggatggggccctaaaggccaacagctgatatttatttttgaaaacaatatctactactgtgcacatgtcgggaaacaggccatccgtgtggtctccactggcaaggaaggtgtgatttacaatggcctcagtgactggctgtatgaagaggagattttgaagacacacatcgcacactggtggtctccggatggcacgagactcgcctacgccgccatcaatgattcccgtgtccccatcatggagctcccaacttacaccggctccatctaccccaccgtgaagccctaccactatcccaaggctggaagtgagaaccccagcatttccctacacgttattggcttaaatggacccacccatgatctggagatgatgccgcctgatgatccacggatgagggagtactacatcaccatggtgaagtgggccaccagcaccaaggtcgccgtgacctggctgaaccgggcgcagaacgtgtccatcctcaccctctgcgacgccaccacgggggtctgcacgaagaaacacgaggatgaaagtgaggcctggctccacagacagaatgaagaacctgtgttctccaaggatggccgaaagtttttcttcatcagagccatcccccagggaggacgagggaaattctatcacatcacggtgtcctcgtcccagcccaacagcagcaacgacaacatccagtccatcacctccggggactgggacgtgaccaagatcctagcctacgatgagaaggggaataagatctacttcctgagcacggaggacctgcctcggagacgacaactctacagtgccaacacggtgggcaacttcaacaggcagtgcctctcctgtgacctggttgagaactgcacctacttcagcgcttccttcagccatagcatggacttcttcctgctcaagtgcgaaggtcctggtgttcctatggtgacggtgcacaacacaacagataagaaaaaaatgtttgacctagaaacaaatgaacatgtcaagaaggccataaatgaccgacagatgcctaaagtggaatacagggacattgagattgatgattacaacctgcccatgcagatactgaagccagcaaccttcaccgacaccacccactaccctctgctcctggtggtggatggcaccccaggcagccagagtgtggctgagaagttcgaggtgagctgggagacggtgatggtgagcagccacggcgcggtggtggtaaagtgtgacggccgtggcagcggcttccaagggaccaagctcctgcacgaagtgaggcggcggctgggcttgctggaggagaaggaccagatggaggccgtgcggacgatgctgaaggagcagtacattgacaggacgcgcgtggccgtgtttgggaaggattacggtggctacctgagcacctacatcctcccagcaaagggagaaaatcaaggccagacattcacctgcggctctgctctctctccaataacagacttcaaactctatgcctctgcgttttccgagaggtacttgggcctccatggacttgacaacagagcatacgagatgaccaaggtagcccatcgagtctccgcgctggaagaacagcagttcctgatcattcatcccactgccgatgaaaaaattcatttccagcacacagcagaactcattacacaactaattaggggaaaggctaattacagcttacagatttacccggacgaaagccattactttaccagctccagcctcaaacagcatctgtaccggtccatcatcaacttcttcgtggaatgcttcaggatccaggacaaactgctgacagtcacagcgaaagaggacgaggaggaggactaagctcaggtcgctctaagcacaaacgtggctctttctacaaccagatgcaaccgagggatttccctgccctccctcttccctcggaggggcggggcggggcggggccgggtgttccatagcatgtgtgtctcggatgcggaaggcagttttgcttgggaaacaagctccttccccggggtcatcactcacggcctccatggcaccagggacaacgctgtccccgcagcagcgcctcctcccggcgcccgagagaccggcacgccacggcccctcccccaaggaacagagcaaaggatggtggccgcaggccccacgcgagcccacaggacaccggcccctagattccagccaccaagcggaagcatgagacccgcccacactagcctctgtgttcccgttagggacatcacaccctgtctcacgtcgcagtgccatggacgcagcagttacagcaccattgttttagcagtgcgtgttcatatatgggcttgctacttcctgtaatgaggacgttcaacatggtgaggggctacaagaaaacgcttttctgtacagagtcttactgtagctacgctaatggttaacctgatagaattaactcgtatttttctatggttttaacctgatgctccactgtctccgtcatggggttgttttgctgtttggggttgggccttgtttccctttcctttctccagtccacgtgtagactttgcgcttgatgaagaagcagatcggaagtaactgctccctcctcaaggttgtcttcagacgtcttggggacgttcctaaacactgagggggaagacagccaatagcacccattaaaagaaatacctaaataaaacctctctcccactcagctatgctagggcttggctgtaggtgtgcactgtctatttacatccgtccttacaaccatccttgtcctccttggtaccgtatcaagctctttcccatgacatttggtttaaaaaaaaaaaaaaaaaaaaaaaaaaaacagaaaaaagacaaagcgtcaactccacccacaggcccgctgtgtgtgctcgggccacgggagtcctgagggttctgtgggcctgcgcgcatccctctcccatcgtgggggtggctccgtgaccttcctgccacgagcaggaggttgatgatgtgctacgttagccttgtaagatacacccccaccaaatgtgcagccggtgttcccagtgtatatttcattctcttgtatataaaggaagcaatgtgtgtcaggcctctgtgcagtcaacccagcctcctcccgccagtgctaaccccgtgttgagcctgcatgctgacactgtggccgatctggactctagaagtgctagtttgaaatatatccattactgtcatttccttttgagcttgtggacaagctgaatgtcaggactgacttcgccagctcccagccctgcgggggtgtccttggcatcccatcagcagaggagatgcgtccctgttgcattttggcgtttggggctttgggtttatccacatgagctctgaacgtccgttatagttagggtgattggaaggtctccatcactgggtgttttaaaggtgattcaccaccatttgtgaaaggaccaacgtgctgataaacaggaccgatccgagtgctacatgactgtgcgtttgctatttcaatgggcctgaacgactacaaagccagctaggtctggaaggggaagccagctctggccacgacatctggtcggagggaagtggggatgtggcatggtagcgtctgttcatccatggaataaaacattattttaccaaaaaaaaaaa

SEQ ID NO: 194 - protein, 865 aa, Homo sapiens
MASLYQRFTGKINTSRSFPAPPEASHLLGGQGPEEDGGAGAKPLGPRAQAAAPRERGGGGGGAGGRPRFQYQARSDGDEEDELVGSNPPQRNWKGIAIALLVILVICSLIVTSVILLTPAEDNSLSQKKKVTVEDLFSEDFKIHDPEAKWISDTEFIYREQKGTVRLWNVETNTSTVLIEGKKIESLRAIRYEISPDREYALFSYNVEPIYQHSYTGYYVLSKIPHGDPQSLDPPEVSNAKLQYAGWGPKGQQLIFIFENNIYYCAHVGKQAIRVVSTGKEGVIYNGLSDWLYEEEILKTHIAHWWSPDGTRLAYAAINDSRVPIMELPTYTGSIYPTVKPYHYPKAGSENPSISLHVIGLNGPTHDLEMMPPDDPRMREYYITMVKWATSTKVAVTWLNRAQNVSILTLCDATTGVCTKKHEDESEAWLHRQNEEPVFSKDGRKFFFIRAIPQGGRGKFYHITVSSSQPNSSNDNIQSITSGDWDVTKILAYDEKGNKIYFLSTEDLPRRRQLYSANTVGNFNRQCLSCDLVENCTYFSASFSHSMDFFLLKCEGPGVPMVTVHNTTDKKKMFDLETNEHVKKAINDRQMPKVEYRDIEIDDYNLPMQILKPATFTDTTHYPLLLVVDGTPGSQSVAEKFEVSWETVMVSSHGAVVVKCDGRGSGFQGTKLLHEVRRRLGLLEEKDQMEAVRTMLKEQYIDRTRVAVFGKDYGGYLSTYILPAKGENQGQTFTCGSALSPITDFKLYASAFSERYLGLHGLDNRAYEMTKVAHRVSALEEQQFLIIHPTADEKIHFQHTAELITQLIRGKANYSLQIYPDESHYFTSSSLKQHLYRSIINFFVECFRIQDKLLTVTAKEDEEED

SEQ ID NO: 195 - DNA, 14565 bp, Homo sapiens
ggagttttccaccatgactattgccctgctgggttttgccatattcttgctccattgtgcgacctgtgagaagcctctagaagggattctctcctcctctgcttggcacttcacacactcccattacaatgccaccatctatgaaaattcttctcccaagacctatgtggagagcttcgagaaaatgggcatctacctcgcggagccacagtgggcagtgaggtaccggatcatctctggggatgtggccaatgtatttaaaactgaggagtatgtggtgggcaacttctgcttcctaagaataaggacaaagagcagcaacacagctcttctgaacagagaggtgcgagacagctacaccctcatcatccaagccacagagaagaccttggagttggaagctttgacccgtgtggtggtccacatcctggaccagaatgacctgaagcctctcttctctccaccttcgtacagagtcaccatctctgaggacatgcccctgaagagccccatctgcaaggtgactgccacagatgctgatctaggccagaatgctgagttctattatgcctttaacacaaggtcagagatgtttgccatccatcccaccagcggtgtggtcactgtggctgggaagcttaacgtcacctggcgaggaaagcatgagctccaggtgctagctgtggaccgcatgcggaaaatctctgagggcaatgggtttggcagcctggctgcacttgtggttcatgtggagcctgccctcaggaagcccccagccattgcttcggtggtggtgactccaccagacagcaatgatggtaccacctatgccactgtactggtcgatgcaaatagctcaggagctgaagtggagtcagtggaagttgttggtggtgaccctggaaagcacttcaaagccatcaagtcttatgcccggagcaatgagttcagtttggtgtctgtcaaagacatcaactggatggagtaccttcatgggttcaacctcagcctccaggccaggagtgggagcggcccttatttttattcccagatcaggggctttcacctaccaccttccaaactgtcttccctcaaattcgagaaggctgtttacagagtgcagcttagtgagttttcccctcctggcagccgcgtggtgatggtgagagtcaccccagccttccccaacctgcagtatgttctaaagccatcttcagagaatgtaggatttaaacttaatgctcgaactgggttgatcaccaccacaaagctcatggacttccacgacagagcccactatcagctacacatcagaacctcaccgggccaggcctccaccgtggtggtcattgacattgtggactgcaacaaccatgcccccctcttcaacaggtcttcctatgatggtaccttggatgagaacatccctccaggcaccagtgttttggctgtgactgccactgaccgggatcatggggaaaatggatatgtcacctattccattgctggaccaaaagctttgccattttctattgacccctacctggggatcatctccacctccaaacccatggactatgaactcatgaaaagaatttataccttccgggtaagagcatcagactggggatccccttttcgccgggagaaggaagtgtccatttttcttcagctcaggaacttgaatgacaaccagcctatgtttgaagaagtcaactgtacagggtctatccgccaagactggccagtagggaaatcgataatgactatgtcagccatagatgtggatgagcttcagaacctaaaatacgagattgtatcaggcaatgaactagagtattttgatctaaatcatttctccggagtgatatccctcaaacgcccttttatcaatcttactgctggtcaacccaccagttattccctgaagattacagcctcagatggcaaaaactatgcctcacccacaactttgaatattactgtggtgaaggaccctcattttgaagttcctgtaacatgtgataaaacaggggtattgacacaattcacaaagactatcctccactttattgggcttcagaaccaggagtccagtgatgaggaattcacttctttaagcacatatcagattaatcattacaccccacagtttgaggaccacttcccccaatccattgatgtccttgagagtgtccctatcaacacccccttggcccgcctagcagccactgaccctgatgctggttttaatggcaaactggtctatgtgattgcagatggcaatgaggagggctgctttgacatagagctggagacagggctgctcactgtagctgctcccttggactatgaagccaccaatttctacatcctcaatgtaacagtatatgacctgggcacaccccagaagtcctcctggaagctgctgacagtgaatgtgaaagactggaatgacaacgcacccagatttcctcccggtgggtaccagttaaccatctcggaggacacagaagttggaaccacaattgcagagctgacaaccaaagatgctgactcggaagacaatggcagggttcgctacaccctgctaagtcccacagagaagttctccctccaccctctcactggggaactggttgttacaggacacctggaccgcgaatcagagcctcggtacatactcaaggtggaggccagggatcagcccagcaaaggccaccagctcttctctgtcactgacctgataatcacattggaggatgtcaacgacaactctccccagtgcatcacagaacacaacaggctgaaggttccagaggacctgccccccgggactgtcttgacatttctggatgcctctgatcctgacctgggccccgcaggtgaagtgcgatatgttctgatggatggcgcccatgggaccttccgggtggacctgatgacaggggcgctcattctggagagagagctggactttgagaggcgagctgggtacaatctgagcctgtgggccagtgatggtgggaggcccctagcccgcaggactctctgccatgtggaggtgatcgtcctggatgtgaatgagaatctccaccctccccactttgcctccttcgtgcaccagggccaggtgcaggagaacagcccctcgggaactcaggtgattgtagtggctgcccaggacgatgacagtggcttggatggggagctccagtacttcctgcgtgctggcactggactcgcagccttcagcatcaaccaagatacaggaatgattcagactctggcacccctggaccgagaatttgcatcttactactggttgacggtattagcagtggacaggggttctgtgcccctctcttctgtaactgaagtctacatcgaggttacggatgccaatgacaacccaccccagatgtcccaagctgtgttctacccctccatccaggaggatgctcccgtgggcacctctgtgcttcaactggatgcctgggacccagactccagctccaaagggaagctgaccttcaacatcaccagtgggaactacatgggattctttatgattcaccctgttacaggtctcctatctacagcccagcagctggacagagagaacaaggatgaacacatcctggaggtgactgtgctggacaatggggaaccctcactgaagtccacctccagggtggtggtaggcatcttggacgtcaatgacaatccacctatattctcccacaagctcttcaatgtccgccttccagagaggctgagccctgtgtcccctgggcctgtgtacaggctggtggcttcagacctggatgagggtcttaatggcagagtcacctacagtatcgaggacagcgatgaggaggccttcagtatcgacctggtcacaggtgtggtttcatccagcagcacttttacagctggagagtacaacatcctaacgatcaaggcaacagacagtgggcagccaccactctcagccagtgtccggctacacattgagtggatcccttggccccggccgtcctccatccctctggcctttgatgagacctactacagctttacggtcatggagacggaccctgtgaaccacatggtgggggtcatcagcgtagagggcagacccggactcttctggttcaacatctcaggtggggataaggacatggactttgacattgagaagaccacaggcagcatcgtcattgccaggcctcttgataccaggagaaggtcgaactataacttgactgttgaggtgacagatgggtcccgcaccattgccacacaggtccacatcttcatgattgccaacattaaccaccatcggccccagtttctggaaactcgttatgaagtcagagttccccaggacaccgtgccaggggtagagctcctgcgagtccaggccatagatcaagacaagggcaaaagcctcatctataccatacatggcagccaagacccaggaagtgccagcctcttccagctggacccaagcagtggtgtcctggtaacggtgggaaaattggacctcggctcggggccctcccagcacacactgacagtcatggtccgagaccaggaaatacctatcaagaggaacttcgtgtgggtgaccattcatgtggaggatggaaacctccacccaccccgcttcactcagctccattatgaggcaagtgttcctgacaccatagcccccggcacagagctgctgcaggtccgagccatggatgctgaccggggagtcaatgctgaggtccactactccctcctgaaagggaacagcgaaggtttcttcaacatcaatgccctgctaggcatcattactctagctcaaaagcttgatcaggcaaatcatgccccacatactctgacagtgaaggcagaagatcaaggctccccacaatggcatgacctggctacagtgatcattcatgtctatccctcagataggagtgcccccatcttttcaaaatctgagtactttgtagagatccctgaatcaatccctgttggttccccaatcctccttgtctctgctatgagcccctctgaagttacctatgagttaagagagggaaataaggatggagtcttctctatgaactcatattctggccttatttccacccagaagaaattggaccatgagaaaatctcgtcttaccagctgaaaatccgaggcagcaatatggcaggtgcatttactgatgtcatggtggtggttgacataattgatgaaaatgacaatgctcctatgttcttaaagtcaacttttgtgggccaaattagtgaagcagctccactgtatagcatgatcatggataaaaacaacaacccctttgtgattcatgcctctgacagtgacaaagaagctaattccttgttggtctataaaattttggagccggaggccttgaagtttttcaaaattgatcccagcatgggaaccctaaccattgtatcagagatggattatgagagcatgccctctttccaattctgtgtctatgtccatgaccaaggaagccctgtattatttgcacccagacctgcccaagtcatcattcatgtcagagatgtgaatgattcccctcccagattctcagaacagatatatgaggtagcaatagtcgggcctatccatccaggcatggagcttctcatggtgcgggccagcgatgaagactcagaagtcaattatagcatcaaaactggcaatgctgatgaagctgttaccatccatcctgtcactggtagcatatctgtgctgaatcctgctttcctgggactctctcggaagctcaccatcagggcttctgatggcttgtatcaagacactgcgctggtaaaaatttctttgacccaagtgcttgacaaaagcttgcagtttgatcaggatgtctactgggcagctgtgaaggagaacttgcaggacagaaaggcactggtgattcttggtgcccagggcaatcatttgaatgacaccctttcctactttctcttgaatggcacagatatgtttcatatggtccagtcagcaggtgtgttgcagacaagaggtgtggcgtttgaccgggagcagcaggacactcatgagttggcagtggaagtgagggacaatcggacacctcagcgggtggctcagggtttggtcagagtctctattgaggatgtcaatgacaatccccccaaatttaagcatctgccctattacacaatcatccaagatggcacagagccaggggatgtcctctttcaggtatctgccactgatgaggacttggggacaaatggggctgttacatatgaatttgcagaagattacacatatttccgaattgacccctatcttggggacatatcactcaagaaaccctttgattatcaagctttaaataaatatcacctcaaagtcattgctcgggatggaggaacgccatccctccagagtgaggaagaggtacttgtcactgtgagaaataaatccaacccactgtttcagagtccttattacaaagtcagagtacctgaaaatatcaccctctataccccaattctccacacccaggcccggagtccagagggactccggctcatctacaacattgtggaggaagaacccttgatgctgttcaccactgacttcaagactggtgtcctaacagtaacagggcctttggactatgagtccaagaccaaacatgtgttcacagtcagagccacggatacagctctggggtcattttctgaagccacagtggaagtcctagtggaggatgtcaatgataaccctcccactttttcccaattggtctataccacttccatctcagaaggcttgcctgctcagacccctgtgatccaactgttggcttctgaccaggactcagggcggaaccgtgacgtctcttatcagattgtggaggatggctcagatgtttccaagttcttccagatcaatgggagcacaggggagatgtccacagttcaagaactggattatgaagcccaacaacactttcatgtgaaagtcagggccatggataaaggagatcccccactcactggtgaaacccttgtggttgtcaatgtgtctgatatcaatgacaaccccccagagttcagacaacctcaatatgaagccaatgtcagtgaactggcaacctgtggacacctggttcttaaagtccaggctattgaccctgacagcagagacacctcccgcctggagtacctgattctttctggcaatcaggacaggcacttcttcattaacagctcatcgggaataatttctatgttcaacctttgcaaaaagcacctggactcttcttacaatttgagggtaggtgcttctgatggagtcttccgagcaactgtgcctgtgtacatcaacactacaaatgccaacaagtacagcccagagttccagcagcacctttatgaggcagaattagcagagaatgcaatggttggaaccaaggtgattgatttgctagccatagacaaagatagtggtccctatggcactatagattatactatcatcaataaactagcaagtgagaagttctccataaaccccaatggccagattgccactctgcagaaactggatcgggaaaattcaacagagagagtcattgctattaaggtcatggctcgggatggaggaggaagagtagccttctgcacggtgaagatcatcctcacagatgaaaatgacaaccccccacagttcaaagcatctgagtacacagtatccattcaatccaatgtcagtaaagactctccggttatccaggtgttggcctatgatgcagatgaaggtcagaacgcagatgtcacctactcagtgaacccagaggacctagttaaagatgtcattgaaattaacccagtcactggtgtggtcaaggtgaaagacagcctggtgggattggaaaatcagacccttgacttcttcatcaaagcccaagatggaggccctcctcactggaactctctggtgccagtacgacttcaggtggttcctaaaaaagtatccttaccgaaattttctgaacctttgtatactttctctgcacctgaagaccttccagaggggtctgaaattgggattgttaaagcagtggcagctcaagatccagtcatctacagtctagtgcggggcactacacctgagagcaacaaggatggtgtcttctccctagacccagacacaggggtcataaaggtgaggaagcccatggaccacgaatccaccaaattgtaccagattgatgtgatggcacattgccttcagaacactgatgtggtgtccttggtctctgtcaacatccaagtgggagacgtcaatgacaataggcctgtatttgaggctgatccatataaggctgtcctcactgagaatatgccagtggggacctcagtcattcaagtgactgccattgacaaggacactgggagagatggccaggtgagctacaggctgtctgcagaccctggtagcaatgtccatgagctctttgccattgacagtgagagtggttggatcaccacactccaggaacttgactgtgagacctgccagacttatcattttcatgtggtggcctatgaccacggacagaccatccagctatcctctcaggccctggttcaggtctccattacagatgagaatgacaatgctccccgatttgcttctgaagagtacagaggatctgtggttgagaacagtgagcctggcgaactggtggcgactctaaagaccctggatgctgacatttctgagcagaacaggcaggtcacctgctacatcacagagggagaccccctgggccagtttggcatcagccaagttggagatgagtggaggatttcctcaaggaagaccctggaccgcgagcatacagccaagtacttgctcagagtcacagcatctgatggcaagttccaggcttcggtcactgtggagatctttgtcctggacgtcaatgataacagcccacagtgttcacagcttctctatactggcaaggttcatgaagatgtatttccaggacacttcattttgaaggtttctgccacagacttggacactgataccaatgctcagatcacatattctctgcatggccctggggcgcatgaattcaagctggatcctcatacaggggagctgaccacactcactgccctagaccgagaaaggaaggatgtgttcaaccttgttgccaaggcgacggatggaggtggccgatcgtgccaggcagacatcaccctccatgtggaggatgtgaatgacaatgccccgcggttcttccccagccactgtgctgtggctgtcttcgacaacaccacagtgaagacccctgtggctgtagtatttgcccgggatcccgaccaaggcgccaatgcccaggtggtttactctctgccggattcagccgaaggccacttttccatcgacgccaccacgggggtgatccgcctggaaaagccgctgcaggtcaggccccaggcaccactggagctcacggtccgtgcctctgacctgggcaccccaataccgctgtccacgctgggcaccgtcacagtctcggtggtgggcctagaagactacctgcccgtgttcctgaacaccgagcacagcgtgcaggtgcccgaggacgccccacctggcacggaggtgctgcagctggccaccctcactcgcccgggcgcagagaagaccggctaccgcgtggtcagcgggaacgagcaaggcaggttccgcctggatgctcgcacagggatcctgtatgtcaacgcaagcctggactttgagacaagccccaagtacttcctgtccattgagtgcagccggaagagctcctcttccctcagtgacgtgaccacagtcatggtcaacatcactgatgtcaatgaacaccggccccaattcccccaagatccatatagcacaagggtcttagagaatgcccttgtgggtgacgtcatcctcacggtatcagcgactgatgaagatggacccctaaatagtgacattacctatagcctcataggagggaaccagcttgggcacttcaccattcaccccaaaaagggggagctacaggtggccaaggccctggaccgggaacaggcctctagttattccctgaagctccgagccacagacagtgggcagcctccactgcatgaggacacagacatcgctatccaagtggctgatgtcaatgataacccaccgagattcttccagctcaactacagcaccactgtccaggagaactcccccattggcagcaaagtcctgcagctgatcctgagtgacccagattctccagagaatggccccccctactcgtttcgaatcaccaaggggaacaacggctctgccttccgagtgaccccggatggatggctggtgactgctgagggcctaagcaggagggctcaggaatggtatcagcttcagatccaggcgtcagacagtggcatccctcccctctcgtctttgacgtctgtccgtgtccatgtcacagagcagagccactatgcaccttctgctctcccactggagatcttcatcactgttggagaggatgagttccagggtggcatggtgggtaagatccatgccacagaccgagacccccaggacacgctgacctatagcctggcagaagaggagaccctgggcaggcacttctcagtgggtgcgcctgatggcaagattatcgccgcccagggcctgcctcgtggccactactcgttcaacgtcacggtcagcgatgggaccttcaccacgactgctggggtccatgtgtacgtgtggcatgtggggcaggaggctctgcagcaggccatgtggatgggcttctaccagctcacccccgaggagctggtgagtgaccactggcggaacctgcagaggttcctcagccataagctggacatcaaacgggctaacattcacttggccagcctccagcctgcagaggccgtggctggtgtggatgtgctcctggtctttgaggggcattctggaaccttctacgagtttcaggagctagcatccatcatcactcactcagccaaggagatggagcattcagtgggggttcagatgcggtcagctatgcccatggtgccctgccaggggccaacctgccagggtcaaatctgccataacacagtgcatctggaccccaaggttgggcccacgtacagcaccgccaggctcagcatcctaaccccgcggcaccacctgcagaggagctgctcctgcaatggtactgctacaaggttcagtggtcagagctatgtgcggtacagggccccagcggctcggaactggcacatccatttctatctgaaaacactccagccacaggccattcttctattcaccaatgaaacagcgtccgtctccctgaagctggccagtggagtgccccagctggaataccactgtctgggtggtttctatggaaacctttcctcccagcgccatgtgaatgaccacgagtggcactccatcctggtggaggagatggacgcttccattcgcctgatggttgacagcatgggcaacacctcccttgtggtcccagagaactgccgtggtctgaggcccgaaaggcacctcttgctgggcggcctcattctgttgcattcttcctcgaatgtctcccagggctttgaaggctgcctggatgctgtcgtggtcaacgaagaggctctagatctgctggcccctggcaagacggtggcaggcttgctggagacacaagccctcacccagtgctgcctccacagtgactactgcagccagaacacatgcctcaatggtgggaagtgctcatggacccatggggcaggctatgtctgcaaatgtcccccacagttctctgggaagcactgtgaacaaggaagggagaactgtacttttgcaccctgcctggaaggtggaacttgcatcctctcccccaaaggagcttcctgtaactgccctcatccttacacaggagacaggtgtgaaatggaggcgaggggttgttcagaaggacactgcctagtcactcccgagatccaaaggggggactgggggcagcaggagttactgatcatcacagtggccgtggcgttcattatcataagcactgtcgggcttctcttctactgccgccgttgcaagtctcacaagcctgtggccatggaggacccagacctcctggccaggagtgttggtgttgacacccaagccatgcctgccatcgagctcaacccattgagtgccagctcctgcaacaacctcaaccaaccggaacccagcaaggcctctgttccaaatgaactcgtcacatttggacccaattctaagcaacggccagtggtctgcagtgtgccccccagactcccgccagctgcggtcccttcccactctgacaatgagcctgtcattaagagaacctggtccagcgaggagatggtgtaccctggcggagccatggtctggccccctacttactccaggaacgaacgctgggaatacccccactccgaagtgactcagggccctctgccgccctcggctcaccgccactcaaccccagtcgtgatgccagagcctaatggcctctatgggggcttccccttccccctggagatggaaaacaagcgggcacctctcccaccccgttacagcaaccagaacctggaagatctgatgccctctcggccccctagtccccgggagcgcctggttgccccctgtctcaatgagtacacggccatcagctactaccactcgcagttccggcagggagggggagggccctgcctggcagacgggggctacaagggggtgggtatgcgcctcagccgagctgggccctcttatgctgtctgtgaggtggagggggcacctcttgcaggccagggccagccccgggtgccccccaactatgagggctctgacatggtggagagtgattatggcagctgtgaggaggtcatgttctagcttcccattcccagagcaaggcaggcgggaggccaaggactggacttggcttatttcttcctgtctcgtagggggtgagttgagtgtggctgggagagtgggagggaagccctcagcccaggctgttgtcccttgaaatgtgctcttccaatcccccacctagtccctgagggtggagggaagctgaggatagagctccagaaacagcactagggtcccaggagaggggcatttctagagcagtgaccctggaaaaccaggaacaattgactcccggggtgggcgagagacaggagggctccctgatctgccggctctcagtccccggggcagagcctgattgactgtgctggctcaacttcaccaagatgcattctcatacctgcccacagctccattttggaggcaggcaggttggtgcctgacagacaaccactacgcgggccgtacagaggagctctagagggctgcgtggcatcctcctaggggctgagaggtgagcagcaggggagcgggcacagtcccctctgcccctgcctcagtcgagcactcactgtgtctttgtcaagtgtctgctccacgtcaggcactgtgctttgcaccggggagaaaatggtgatggagggcaacaaggactccgaggagcaccaccaggcctcgggccccagaggtcccactcctcagcctacacgcagaggaacgggcccacctcagagtcacaccactggctgccagtcagggcctgccaggagtctacacagctctgaaccttctttgttaaagaattcagacctcatggaactctgggttcttcatcccaagtttcccaggcacttttggccaaaggaaggaaggaactaattcttcattttaaaaattcttaggcactttttgaccttgctgtctggatgagtttcctcaatgggatttttcttccctagacacaaggaagtctgaactcctatttagggccggttggaagcagggagctggaccgcagtgtccaggctggacacctgccattgcctcctctccattgcagacgcctgcccatcaagtattacctgcggcgactcaaccctatgcatggagggtcaatgtgggcacatgtctacacatgtgggtgcccatggatagtacgtgtgtacacatgtgtagagtgtatgtagccaggagtggtggggaccagaagcctctgtggcctttggtgacctcaccactccctcccacccagtccctccctctggtccactgccttttcatatgtgttgtttctggagacagaagtcaaaaggaagagcagtggagccttgcccacagggctgctgcttcatgcgagagggagatgtgtgggcgagagccaatttgtgtgagtggtttgtggctgtgtgtgtgactgtgagtgtgagtgacagatacatagtttcattggtcattttttttttaacaataaagtatctttttttactgttaaaaaaaaaaaaaaaaaaaaaaaaaaaaaa

SEQ ID NO: 196 - protein, 4349 aa, Homo sapiens
MTIALLGFAIFLLHCATCEKPLEGILSSSAWHFTHSHYNATIYENSSPKTYVESFEKMGIYLAEPQWAVRYRIISGDVANVFKTEEYVVGNFCFLRIRTKSSNTALLNREVRDSYTLIIQATEKTLELEALTRVVVHILDQNDLKPLFSPPSYRVTISEDMPLKSPICKVTATDADLGQNAEFYYAFNTRSEMFAIHPTSGVVTVAGKLNVTWRGKHELQVLAVDRMRKISEGNGFGSLAALVVHVEPALRKPPAIASVVVTPPDSNDGTTYATVLVDANSSGAEVESVEVVGGDPGKHFKAIKSYARSNEFSLVSVKDINWMEYLHGFNLSLQARSGSGPYFYSQIRGFHLPPSKLSSLKFEKAVYRVQLSEFSPPGSRVVMVRVTPAFPNLQYVLKPSSENVGFKLNARTGLITTTKLMDFHDRAHYQLHIRTSPGQASTVVVIDIVDCNNHAPLFNRSSYDGTLDENIPPGTSVLAVTATDRDHGENGYVTYSIAGPKALPFSIDPYLGIISTSKPMDYELMKRIYTFRVRASDWGSPFRREKEVSIFLQLRNLNDNQPMFEEVNCTGSIRQDWPVGKSIMTMSAIDVDELQNLKYEIVSGNELEYFDLNHFSGVISLKRPFINLTAGQPTSYSLKITASDGKNYASPTTLNITVVKDPHFEVPVTCDKTGVLTQFTKTILHFIGLQNQESSDEEFTSLSTYQINHYTPQFEDHFPQSIDVLESVPINTPLARLAATDPDAGFNGKLVYVIADGNEEGCFDIELETGLLTVAAPLDYEATNFYILNVTVYDLGTPQKSSWKLLTVNVKDWNDNAPRFPPGGYQLTISEDTEVGTTIAELTTKDADSEDNGRVRYTLLSPTEKFSLHPLTGELVVTGHLDRESEPRYILKVEARDQPSKGHQLFSVTDLIITLEDVNDNSPQCITEHNRLKVPEDLPPGTVLTFLDASDPDLGPAGEVRYVLMDGAHGTFRVDLMTGALILERELDFERRAGYNLSLWASDGGRPLARRTLCHVEVIVLDVNENLHPPHFASFVHQGQVQENSPSGTQVIVVAAQDDDSGLDGELQYFLRAGTGLAAFSINQDTGMIQTLAPLDREFASYYWLTVLAVDRGSVPLSSVTEVYIEVTDANDNPPQMSQAVFYPSIQEDAPVGTSVLQLDAWDPDSSSKGKLTFNITSGNYMGFFMIHPVTGLLSTAQQLDRENKDEHILEVTVLDNGEPSLKSTSRVVVGILDVNDNPPIFSHKLFNVRLPERLSPVSPGPVYRLVASDLDEGLNGRVTYSIEDSDEEAFSIDLVTGVVSSSSTFTAGEYNILTIKATDSGQPPLSASVRLHIEWIPWPRPSSIPLAFDETYYSFTVMETDPVNHMVGVISVEGRPGLFWFNISGGDKDMDFDIEKTTGSIVIARPLDTRRRSNYNLTVEVTDGSRTIATQVHIFMIANINHHRPQFLETRYEVRVPQDTVPGVELLRVQAIDQDKGKSLIYTIHGSQDPGSASLFQLDPSSGVLVTVGKLDLGSGPSQHTLTVMVRDQEIPIKRNFVWVTIHVEDGNLHPPRFTQLHYEASVPDTIAPGTELLQVRAMDADRGVNAEVHYSLLKGNSEGFFNINALLGIITLAQKLDQANHAPHTLTVKAEDQGSPQWHDLATVIIHVYPSDRSAPIFSKSEYFVEIPESIPVGSPILLVSAMSPSEVTYELREGNKDGVFSMNSYSGLISTQKKLDHEKISSYQLKIRGSNMAGAFTDVMVVVDIIDENDNAPMFLKSTFVGQISEAAPLYSMIMDKNNNPFVIHASDSDKEANSLLVYKILEPEALKFFKIDPSMGTLTIVSEMDYESMPSFQFCVYVHDQGSPVLFAPRPAQVIIHVRDVNDSPPRFSEQIYEVAIVGPIHPGMELLMVRASDEDSEVNYSIKTGNADEAVTIHPVTGSISVLNPAFLGLSRKLTIRASDGLYQDTALVKISLTQVLDKSLQFDQDVYWAAVKENLQDRKALVILGAQGNHLNDTLSYFLLNGTDMFHMVQSAGVLQTRGVAFDREQQDTHELAVEVRDNRTPQRVAQGLVRVSIEDVNDNPPKFKHLPYYTIIQDGTEPGDVLFQVSATDEDLGTNGAVTYEFAEDYTYFRIDPYLGDISLKKPFDYQALNKYHLKVIARDGGTPSLQSEEEVLVTVRNKSNPLFQSPYYKVRVPENITLYTPILHTQARSPEGLRLIYNIVEEEPLMLFTTDFKTGVLTVTGPLDYESKTKHVFTVRATDTALGSFSEATVEVLVEDVNDNPPTFSQLVYTTSISEGLPAQTPVIQLLASDQDSGRNRDVSYQIVEDGSDVSKFFQINGSTGEMSTVQELDYEAQQHFHVKVRAMDKGDPPLTGETLVVVNVSDINDNPPEFRQPQYEANVSELATCGHLVLKVQAIDPDSRDTSRLEYLILSGNQDRHFFINSSSGIISMFNLCKKHLDSSYNLRVGASDGVFRATVPVYINTTNANKYSPEFQQHLYEAELAENAMVGTKVIDLLAIDKDSGPYGTIDYTIINKLASEKFSINPNGQIATLQKLDRENSTERVIAIKVMARDGGGRVAFCTVKIILTDENDNPPQFKASEYTVSIQSNVSKDSPVIQVLAYDADEGQNADVTYSVNPEDLVKDVIEINPVTGVVKVKDSLVGLENQTLDFFIKAQDGGPPHWNSLVPVRLQVVPKKVSLPKFSEPLYTFSAPEDLPEGSEIGIVKAVAAQDPVIYSLVRGTTPESNKDGVFSLDPDTGVIKVRKPMDHESTKLYQIDVMAHCLQNTDVVSLVSVNIQVGDVNDNRPVFEADPYKAVLTENMPVGTSVIQVTAIDKDTGRDGQVSYRLSADPGSNVHELFAIDSESGWITTLQELDCETCQTYHFHVVAYDHGQTIQLSSQALVQVSITDENDNAPRFASEEYRGSVVENSEPGELVATLKTLDADISEQNRQVTCYITEGDPLGQFGISQVGDEWRISSRKTLDREHTAKYLLRVTASDGKFQASVTVEIFVLDVNDNSPQCSQLLYTGKVHEDVFPGHFILKVSATDLDTDTNAQITYSLHGPGAHEFKLDPHTGELTTLTALDRERKDVFNLVAKATDGGGRSCQADITLHVEDVNDNAPRFFPSHCAVAVFDNTTVKTPVAVVFARDPDQGANAQVVYSLPDSAEGHFSIDATTGVIRLEKPLQVRPQAPLELTVRASDLGTPIPLSTLGTVTVSVVGLEDYLPVFLNTEHSVQVPEDAPPGTEVLQLATLTRPGAEKTGYRVVSGNEQGRFRLDARTGILYVNASLDFETSPKYFLSIECSRKSSSSLSDVTTVMVNITDVNEHRPQFPQDPYSTRVLENALVGDVILTVSATDEDGPLNSDITYSLIGGNQLGHFTIHPKKGELQVAKALDREQASSYSLKLRATDSGQPPLHEDTDIAIQVADVNDNPPRFFQLNYSTTVQENSPIGSKVLQLILSDPDSPENGPPYSFRITKGNNGSAFRVTPDGWLVTAEGLSRRAQEWYQLQIQASDSGIPPLSSLTSVRVHVTEQSHYAPSALPLEIFITVGEDEFQGGMVGKIHATDRDPQDTLTYSLAEEETLGRHFSVGAPDGKIIAAQGLPRGHYSFNVTVSDGTFTTTAGVHVYVWHVGQEALQQAMWMGFYQLTPEELVSDHWRNLQRFLSHKLDIKRANIHLASLQPAEAVAGVDVLLVFEGHSGTFYEFQELASIITHSAKEMEHSVGVQMRSAMPMVPCQGPTCQGQICHNTVHLDPKVGPTYSTARLSILTPRHHLQRSCSCNGTATRFSGQSYVRYRAPAARNWHIHFYLKTLQPQAILLFTNETASVSLKLASGVPQLEYHCLGGFYGNLSSQRHVNDHEWHSILVEEMDASIRLMVDSMGNTSLVVPENCRGLRPERHLLLGGLILLHSSSNVSQGFEGCLDAVVVNEEALDLLAPGKTVAGLLETQALTQCCLHSDYCSQNTCLNGGKCSWTHGAGYVCKCPPQFSGKHCEQGRENCTFAPCLEGGTCILSPKGASCNCPHPYTGDRCEMEARGCSEGHCLVTPEIQRGDWGQQELLIITVAVAFIIISTVGLLFYCRRCKSHKPVAMEDPDLLARSVGVDTQAMPAIELNPLSASSCNNLNQPEPSKASVPNELVTFGPNSKQRPVVCSVPPRLPPAAVPSHSDNEPVIKRTWSSEEMVYPGGAMVWPPTYSRNERWEYPHSEVTQGPLPPSAHRHSTPVVMPEPNGLYGGFPFPLEMENKRAPLPPRYSNQNLEDLMPSRPPSPRERLVAPCLNEYTAISYYHSQFRQGGGGPCLADGGYKGVGMRLSRAGPSYAVCEVEGAPLAGQGQPRVPPNYEGSDMVESDYGSCEEVMF

SEQ ID NO: 197 - DNA, 4149 bp, Homo sapiens
agagcgcagggagcagccggtggctcggcggcggcggcggcggcggcggcggcgtcggcgtcgtctacctccagcttctcctccctcctcctccgtctcctcctctctctctccatctgctgtggttatggcctgtcgctggagcacaaaagagtctccgcggtggaggtctgcgttgctcttgcttttcctcgctggggtgtacggaaatggtgctcttgcagaacattctgaaaatgtgcatatttcaggagtgtcaactgcttgtggagagactccagagcaaatacgagcaccaagtggcataatcacaagcccaggctggccttctgaatatcctgcaaaaatcaactgtagctggttcataagggcaaacccaggcgaaatcattactataagttttcaggattttgatattcaaggatccagaaggtgcaatttggactggttgacaatagaaacatacaagaatattgaaagttacagagcttgtggttccacaattccacctccgtatatctcttcacaagaccacatctggattaggtttcattcggatgacaacatctctagaaagggtttcagactggcatatttttcagggaaatctgaggaaccaaattgtgcttgtgatcagtttcgttgtggtaatggaaagtgtataccagaagcctggaaatgtaataacatggatgaatgtggagatagttccgatgaagagatctgtgccaaagaagcaaatcctccaactgctgctgcttttcaaccctgtgcttacaaccagttccagtgtttatcccgttttaccaaagtttacacttgcctccccgaatctttaaaatgtgatgggaacattgactgccttgacctaggagatgagatagactgtgatgtgccaacatgtgggcaatggctaaaatatttttatggtacttttaattctcccaattatccagacttttatcctcctggaagcaattgcacctggttaatagacactggtgatcaccgtaaagtcattttacgcttcactgactttaaacttgatggtactggttatggtgattatgtcaaaatatatgatggattagaggagaatccacacaagcttttgcgtgtgttgacagcttttgattctcatgcacctcttacagttgtttcttcttctggacagataagggtacatttttgtgctgataaagtgaatgctgcaaggggatttaatgctacttaccaagtagatgggttctgtttgccatgggaaataccctgtggaggtaactgggggtgttatactgagcagcagcgttgtgatgggtattggcattgcccaaatggaagggatgaaaccaattgtaccatgtgccagaaggaagaatttccatgttcccgaaatggtgtctgttatcctcgttctgatcgctgcaactaccagaatcattgcccaaatggctcagatgaaaaaaactgctttttttgccaaccaggaaatttccattgtaaaaacaatcgttgtgtgtttgaaagttgggtgtgtgattctcaagatgactgtggtgatggcagcgatgaagaaaattgcccagtaatcgtgcctacaagagtcatcactgctgccgtcatagggagcctcatctgtggcctgttactcgtcatagcattgggatgtacttgtaagctttattctctgagaatgtttgaaagaagatcatttgaaacacagttgtcaagagtggaagcagaattgttaagaagagaagctcctccctcgtatggacaattgattgctcagggtttaattccaccagttgaagattttcctgtttgttcacctaatcaggcttctgttttggaaaatctgaggctagcggtacgatctcagcttggatttacttcagtcaggcttcctatggcaggcagatcaagcaacatttggaaccgtatttttaattttgcaagatcacgtcattctgggtcattggctttggtctcagcagatggagatgaggttgtccctagtcagagtaccagtagagaacctgagagaaatcatactcacagaagtttgttttccgtggagtctgatgatacagacacagaaaatgagagaagagatatggcaggagcatctggtggggttgcagctcctttgcctcaaaaagtccctcccacaacggcagtagaagcgacagtaggagcatgtgcaagttcctcaactcagagtacccgaggtggtcatgcagataatggaagggatgtgacaagtgtggaacccccaagtgtgagtccagcacgtcaccagcttacaagtgcactcagtcgtatgactcaggggctacgctgggtacgttttacattaggacgatcaagttccctaagtcagaaccagagtcctttgagacaacttgataatggggtaagtggaagagaagatgatgatgatgttgaaatgctaattccaatttctgatggatcttcagactttgatgtgaatgactgctccagacctcttcttgatcttgcctcagatcaaggacaagggcttagacaaccatataatgcaacaaatcctggagtaaggccaagtaatcgagatggcccctgtgagcgctgtggtattgtccacactgcccagataccagacacttgcttagaagtaacactgaaaaacgaaacgagtgatgatgaggctttgttactttgttaggtacgaatcacataagggagattgtatacaagttggagcaatatccatttattattttgtaactttacagttaaactagttttagtttaaaaagaaaaaatgcagggtgatttcttattattatatgttagcctgcatggttaaattcgacaacttgtaactctatgaacttagagtttactattttagcagctaaaaatgcatcacatattcatattgttcaataatgtcctttcatttgtttctgattgttttcatcctgatactgtagttcactgtagaaatgtggctgctgaaactcatttgattgtcatttttatctatcctatgttaaatggtttgtttttacaaaataataccttattttaattgaaacgtttatgcttttgccaacacatcttgtaacttaatatactagatgttaaggttgttaatgtacaaaaaaaaaacccttatactcacctgcgttttcatttgtttgacatttgtctattattggatttcattatcatatgaacttgtcagtgggaaacaaactgtctaaaaatttttctcttacgtttaacatacaatcatgtgaaatttaggcagagttcgataaattactggcaaaaacaaaactcttttataaagattttctaatgttgactttaatactctaacatggtacaaaccaaatggtaaaatcccaagtcatttcttttttcatctctatttagcaacagaattaagtggatgaagatattctactatgcattaaatcttgaactttataaaacatgtacaaaaattgtacaagataagttccacctggtaatgtctttccctaatacagggttgcgcttgcattggaccctagggatttgcactaaaattatatcaaggtctcagatgagcttagtgcacaagcactatcactttaaatactattatttgctaccacagcaactatatatttccatagcttttggctgggggcgggggacatttttattacaacttgaaattgctttgctggtttcatatttatttgttgtatttaaaaaatacattgttgtaagagtgattttttcaatatattttattcctgggggggatcatgctacactctcaaaagaaaattaagaaatcattcagatcatcccccctttttaagtagtgtgaattgcaaaacccaacatattttttttactgtcagttgcggtttatttattctttaactgtctgttttagtagtttaatgattatgaaaaatgtatctgtgtgtgatttgctatttattaaattttaagtactttgctgaatgtcattttaaagcatgtttgaagtcttgtgtatttgtctgtgttaatgctgtcaggaggaactgactaagatgttttaatatgtatcaaaaattaaaatgattttttttattgccttgaggtactttttaaatcaaa

SEQ ID NO: 198 - protein, 859 aa, Homo sapiens
MACRWSTKESPRWRSALLLLFLAGVYGNGALAEHSENVHISGVSTACGETPEQIRAPSGIITSPGWPSEYPAKINCSWFIRANPGEIITISFQDFDIQGSRRCNLDWLTIETYKNIESYRACGSTIPPPYISSQDHIWIRFHSDDNISRKGFRLAYFSGKSEEPNCACDQFRCGNGKCIPEAWKCNNMDECGDSSDEEICAKEANPPTAAAFQPCAYNQFQCLSRFTKVYTCLPESLKCDGNIDCLDLGDEIDCDVPTCGQWLKYFYGTFNSPNYPDFYPPGSNCTWLIDTGDHRKVILRFTDFKLDGTGYGDYVKIYDGLEENPHKLLRVLTAFDSHAPLTVVSSSGQIRVHFCADKVNAARGFNATYQVDGFCLPWEIPCGGNWGCYTEQQRCDGYWHCPNGRDETNCTMCQKEEFPCSRNGVCYPRSDRCNYQNHCPNGSDEKNCFFCQPGNFHCKNNRCVFESWVCDSQDDCGDGSDEENCPVIVPTRVITAAVIGSLICGLLLVIALGCTCKLYSLRMFERRSFETQLSRVEAELLRREAPPSYGQLIAQGLIPPVEDFPVCSPNQASVLENLRLAVRSQLGFTSVRLPMAGRSSNIWNRIFNFARSRHSGSLALVSADGDEVVPSQSTSREPERNHTHRSLFSVESDDTDTENERRDMAGASGGVAAPLPQKVPPTTAVEATVGACASSSTQSTRGGHADNGRDVTSVEPPSVSPARHQLTSALSRMTQGLRWVRFTLGRSSSLSQNQSPLRQLDNGVSGREDDDDVEMLIPISDGSSDFDVNDCSRPLLDLASDQGQGLRQPYNATNPGVRPSNRDGPCERCGIVHTAQIPDTCLEVTLKNETSDDEALLLC

SEQ ID NO: 199 - DNA, 3747 bp, Homo sapiens
gaattcggccgctgagagaccctggacactgttcctgctccctcgccaccaaaacttctcctccagtcccctcccctgcaggaccatcgcccgcagcctctgcacctgttttcttgtgtttaagggtggggtttgcccccctccccacgctcccatctctgatcctcccaccttcacccgcccaccccgcgagtgagtgcggtgcccaggcgcgcttggcctgagaggtcggcagcagacccggcagcgccaaccgcccagccgctctgactgctccggctgcccgcccgcgcggcgcgggctgtcctggaccctaggaggggacggaaccggacttgcctttgggcaccttccagggccctctccaggtcggctggctaatcatcggacagacggactgcacacatcttgtttccgcgtctccgcaaaaacgcgaggtccaggtcagttgtagactcttgtgctggttgcaggccaagtggacctgtactgaaaatgggtccaataggtgcagaggctgatgagaaccagacagtggaagaaatgaaggtggaacaatacgggccacaaacaactcctagaggtgaactggtccctgaccctgagccagagcttatagatagtaccaagctgattgaggtacaagttgttctcatattggcctactgctccatcatcttgcttggggtaattggcaactccttggtgatccatgtggtgatcaaattcaagagcatgcgcacagtaaccaactttttcattgccaatctggctgtggcagatcttttggtgaacactctgtgtctaccgttcactcttacctataccttaatgggggagtggaaaatgggtcctgtcctgtgccacctggtgccctatgcccagggcctggcagtacaagtatccacaatcaccttgacagtaattgccctggaccggcacaggtgcatcgtctaccacctagagagcaagatctccaagcgaatcagcttcctgattattggcttggcctggggcatcagtgccctgctggcaagtcccctggccatcttccgggagtattcgctgattgagatcattccggactttgagattgtggcctgtactgaaaagtggcctggcgaggagaagagcatctatggcactgtctatagtctttcttccttgttgatcttgtatgttttgcctctgggcattatatcattttcctacactcgcatttggagtaaattgaagaaccatgtcagtcctggagctgcaaatgaccactaccatcagcgaaggcaaaaaaccaccaaaatgctggtgtgtgtggtggtggtgtttgcggtcagctggctgcctctccatgccttccagcttgccgttgacattgacagccaggtcctggacctgaaggagtacaaactcatcttcacagtgttccacattatcgccatgtgctccacttttgccaatccccttctctatggctggatgaacagcaactacagaaaggctttcctctcggccttccgctgtgagcagcggttggatgccattcactctgaggtgtccgtgacattcaaggctaaaaagaacctggaggtcagaaagaacagtggccccaatgactctttcacagaggctaccaatgtctaaggaagctgtggtgtgaaaatgtatggatgaattctgaccagagctatgaatctggttgatggcggctcacaagtgaaaactgatttcccattttaaagaagaagtggatctaaatggaagcatctgctgtttaattcctggaaaactggctgggcagagcctgtgtgaaaatactggaattcaaagataaggcaacaaaatggtttacttaacagttggttgggtagtaggttgcattatgagtaaaagcagagagaagtacttttgattattttcctggagtgaagaaaacttgaacaagaaattggtattatcaaagcattgctgagagacggtgggaaaataagttgactttcaaatcacgttaggacctggattgaggaggtgtgcagttcgctgctccctgcttggcttatgaaaacaccactgaacagaaatttctccagggagccacaggctctccttcatcgcattttgatttttttgttcattctctagacaaaatccatcagggaatgctgcaggaaacgattgccaactatacgaatggcttcgaggagataaactgaaatttgctatataattaatattttggcagatgataggggaactcctcaacactcagtgggccaattgttcttaaaaccaattgcacgtttggtgaaagtttcttcaactctgaatcaaaagctgaaattctcagaattacaggaaatgcaaaccatcatttaatttctaatttcaagttacatccgctttatggagatactatttagataacaagaatacaacttgatacttttattgttatacctttttgaacatgtatgatttctgttgttattcctattggagctaagtttgtctacactaaaatttaaatcagactagagaataatttttgtggcatgttgtaacatttcacagtatttacaagctatttttgcacaggtacatagctctcatgtatttaaagaacactgcagtgttattttctttgaaattcatcctccacggacccattcatactaaataaaacaatgtaattacattaaaatggacctatctgtaagaggtactaaaaacactggattcatttcatcttgcaaatgttgtatttcaaaccagtttcacataagttatttgtcttcttttcaaaataattagctatatttttatataatatgaatatatacataaaaattgtttctataaattgtagaacatagatgctacagtattttttatttaattatattatgaataaaattgttatttcaatagtacccaaccaaagatgcttaaaaaccttctatgttcataaaaaataacaactgagatgttaaaatagtcatacgtctttagatgctattaaagtttcattagtcatatttttgtaaatatgacagaatttgtgaatatatttttaaagcaaaaaacttcaacatgcatatgatatatagttacaacattaattttatgaactggagagctttactttgtggatatatttaaaattcatattatagctcctattaaattccttccatgatagatataaaggactggtttttaagtgcactgcacttctggaatactgaaaaagaatgaaaacaatatgttagattaggtgtaagactttaagaagcgaacaaaaagtaatgtatatctgtaatatataatcaaatgattcatttttctgttagactaggcaaattgttcaaaaataacctttttgtcttttaagtagcagtcactttgcttaagatgctaatagaaaactgtggttaaagatttaccctccctcttggtgaattattacactgtaagaaatgtatatgctactgtgttacatgttgtattagtaaattattagaatccaattaatgattcaattaacatatatcttatccaattcattatgtcaattcattaataaaataccttttatgtagaggctttatgttgcaattaaaaagttgggaaaatgaaaaaaaaaaaaaaaaaaaaaaaaaaaaaaaaaaaaaaaaaaaaaaaaaaaaaaaaaaaaaaaaaaaaaaaaaaaaaaaaaaaaaaaaaaaaaaaaaaaaaaaaaaaaaaaaaaaa

SEQ ID NO: 200 - protein, 381 aa, Homo sapiens
MGPIGAEADENQTVEEMKVEQYGPQTTPRGELVPDPEPELIDSTKLIEVQVVLILAYCSIILLGVIGNSLVIHVVIKFKSMRTVTNFFIANLAVADLLVNTLCLPFTLTYTLMGEWKMGPVLCHLVPYAQGLAVQVSTITLTVIALDRHRCIVYHLESKISKRISFLIIGLAWGISALLASPLAIFREYSLIEIIPDFEIVACTEKWPGEEKSIYGTVYSLSSLLILYVLPLGIISFSYTRIWSKLKNHVSPGAANDHYHQRRQKTTKMLVCVVVVFAVSWLPLHAFQLAVDIDSQVLDLKEYKLIFTVFHIIAMCSTFANPLLYGWMNSNYRKAFLSAFRCEQRLDAIHSEVSVTFKAKKNLEVRKNSGPNDSFTEATNV

SEQ ID NO: 201 - DNA, 975 bp, Homo sapiens
atgtctttcttctttgtagacttaagacccatgaacaggtcagcaacacacatcgtgacagagtttattctcctgggattccctggttgctggaagattcagattttcctcttctcattgtttttggtgatttatgtcttgaccttgctgggaaatggagccatcatctatgcagtgagatgcaacccactactacacacccccatgtactttctgctgggaaattttgccttccttgagatctggtatgtgtcctccactattcctaacatgctagtcaacattctctccaagaccaaggccatctcattttctgggtgcttcctccagttctatttcttcttttcactgggaacaactgaatgtctctttctggcagtaatggcttatgatcgatacctggccatctgccacccactgcagtaccctgccatcatgactgtaaggttctgtggtaagctggtgtctttctgttggcttattggattccttggatacccaattcccattttctacatctcccaactccccttctgtggtcctaatatcattgatcacttcctgtgtgacatggacccattgatggctctatcctgtgccccagctcccataactgaatgtattttctatactcagagctcccttgtcctctttttcactagtatgtacattcttcgatcctatatcctgttactaacagctgtttttcaggtcccttctgcagctggtcggagaaaagccttctctacctgtggttctcatttggttgtggtatctcttttctatgggacagtcatggtaatgtatgtaagtcctacatatgggatcccaactttattgcagaagatcctcacactggtatattcagtaacgactcctctttttaatcctctgatctatactcttcgtaataaggacatgaaactcgctctgagaaatgtcctgtttggaatgagaattcgtcaaaattcgtga

SEQ ID NO: 202 - protein, 324 aa, Homo sapiens
MSFFFVDLRPMNRSATHIVTEFILLGFPGCWKIQIFLFSLFLVIYVLTLLGNGAIIYAVRCNPLLHTPMYFLLGNFAFLEIWYVSSTIPNMLVNILSKTKAISFSGCFLQFYFFFSLGTTECLFLAVMAYDRYLAICHPLQYPAIMTVRFCGKLVSFCWLIGFLGYPIPIFYISQLPFCGPNIIDHFLCDMDPLMALSCAPAPITECIFYTQSSLVLFFTSMYILRSYILLLTAVFQVPSAAGRRKAFSTCGSHLVVVSLFYGTVMVMYVSPTYGIPTLLQKILTLVYSVTTPLFNPLIYTLRNKDMKLALRNVLFGMRIRQNS

SEQ ID NO: 203 - DNA, 5352 bp, Homo sapiens
tgaaatatggaggatgcagctgcacttgactgaccgattaaaagatttcccttgactttgagaaacgatatttaatcagaacaaaatactgtgcactaaagatggagttttcctggggaagcggccaggaatcccggcgtctgctgctcttacttcttctcctcgcagcctgggaggcagggaacggtcagctccactactcggtctccgaggaggccaaacacggcaccttcgtgggccgcatcgcgcaggacctgggactggagctggcggagctggtgccgcgcctgttccgggtggcgtccaagggccgcggaggccttctggaggtaaatctgcagaatggcattttgtttgtgaattctcggatcgaccgggaggagctgtgccggcggagcgcggagtgcagcatccacctggaggtgatcgtagacaggccgctgcaggttttccatgtggacgtggaggtgagggacattaacgataacccgccggtgttcccagcaacacaaaagaacctgtccatcgcggaatccaggccgcttgactctcggtttccactagagggcgcctcggatgcagatatcggggagaacgccctgctcacttacagactgagcccaaatgaatacttttctctggaaaaaccacctgatgacgagctggtaaaaggtcttgggcttatattacggaaatctttagacagagaagaagctccggagatttttttagtgctcacagccactgatggaggcaaacccgagttgactggcaccgttcagttactcatcacagtactggatgccaatgacaatgccccagcttttgacagaaccatttataaggtgagattactagaaaatgttcctaatggaacattggtaattaaacttaacgcctcagatttagacgaaggattgaatggggacattgtttattcattctcaaatgatatttcgccaaatgtgaaatccaagtttcacatagatccaattactggacaaattattgtaaagggatatattgactttgaagaaagcaaatcctatgaaattattgtagagggcattgataagggacagctcccactttctggccattgtagagttattgtggaagtagaagacaacaacgataatgtcccagatttggaattcaagtctttatcacttccaattagagaggacgctccactgggtacagtcatcgccctgatcagcgtgtccgacaaagacatgggtgtcaatgggctggtcacctgctccttgacgtcccacgtccccttcaagctggtgtccaccttcaagaattactactcgttggtgctggacagtgccctggaccgcgagagcgtgtcagcctatgagctggtggtgaccgcgcgagacgggggctcgccttcgctgtgggccacggccagtgtttctgtggaggtggctgatgtgaacgacaacgctccggcgttcgcgcagcccgagtacacagtgttcgtgaaggagaacaacccgccgggctgccacatcttcactgtgtctgcgtgggacgcggacgcgcaggagaacgcgctggtgtcctactcgctggtagagcggcgggtaggggagcgcgcgctgtcgagctacgtttcggtgcatgcggagagcggcaaggtgtacgcgctgcagccgctggaccacgaggagctagagctgctgcagtttcaggtgaccgctcgcgatgccggcgtgccacctctgggcagcaacgtgacgctgcaggtgttcgtgctggacgaaaacgacaacgcgccagcactgctagcgcctcgggcgggtggcactggtggcgcagtgagcgagctggtgccatggtcggtgggtgtgggccacgtggtggcaaaggtgcgcgcggtggatgctgactcgggctacaacgcgtggctttcgtacgagctgcagccggggactggtggcgcgcgcatcccgttccgcgtggggctgtacactggcgagatcagcacaacgcgtgccctggacgaaacggacgctccgcgccaccgcctactggtactggtgaaggaccacggcgagcccgcgctgacggccacggccactgtgctggtgtcacttgtggagagtggacaggcgccaaaggcctcctcacgggcgttggtgggcgctgtgggtcccgatgctgcgctggtggatgtcaacgtatacctgatcattgccatctgcgcggtgtccagccttttggtgctcacgctgctgctgtacaccgcgctgcggtgctctgcgctgcccaccgagggcgcgtgcgctccgggcaagcccacgctggtgtgctccagtgcggtggggagctggtcatactcgcagcagaggaggccgagggtgtgctctggtgagggcccacccaagaccgacctcatggccttcagccccagtttacctgactctagggacagagaagatcagctgcagacaactgaggaatcctttgcaaagccacgacagcccaaccctgactggcgttactctgcctccctgagagcaggcatgcacagctctgtgcacctagaggaggctggcattctacgggctggtccaggagggcctgatcagcagtggccaacagtatccagtgcaacaccagaaccagaggcaggagaagtgtcccctccagtcggtgcgggtgtcaacagcaacagctggacctttaaatacggaccaggcaaccccaaacaatccggtcccggtgagttgcccgacaaattcattatcccaggatctcctgcaatcatctccatccggcaggagcctactaacagccaaattgacaaaagtgacttcataaccttcggcaaaaaggaggagaccaagaaaaagaagaaaaagaagaagggtaacaagacccaggagaaaaaagagaaagggaacagcacgactgacaacagtgaccagtgaggtcctcaaatggaaacaagccacttagccagtttttgtaataatggcaaatctctcccatgtagcaattccctgctcctttttcctatctacatgagccctcttagagacctcagaaatctgcagaaagttccctgtgtctgtctagaacgcatttaacaggttttgtcgtaaaagctttactaagtctggtgttaactctttctctccactctggcttgttttcagaacctaaaaagcagacccaagtttcctttctcctccgccgcaaaggagaggcttcccagccccgccagtgagaggttggactctctgccctgtgctccggggatcctgtcttgatgacacttgcagggcaggctgaaaagttttgagattgagcagcttgggagtttgtggccactgggtatgtgtggctaccgcgggtatgcgagtgccagatattggctgagacgagccagcttagactaattggtacaaggaaggcaagaaaacaaagacaaataaacagcggaagttatcagtatggaggggaagtgtaaacttaaagggaccagactttctaaatcttacaactcaagaggtggcagccaccctctaggagacaaaactacccccactgacaaggctttaggagaccctaaagtctgttggctgtgacgtcattatacctaaaatctgcatcatacctgcaagccaacagttcagtgttttaacagagaaccaccctgggaaacagaagcagatctgatgtgtttcctatacatgtcctgtgctcactttattaaaaattcttttgcacacaatgtttatgaaaaggccagatccttttccaatacttatgcaaaagcaaaagaaaaccccgacacctcacctttcgctgtttgttgtttcatagatttatttaaaaaaagagaaagtctatagctataaatctttaaagagaaatatgaatacaattcccctaaactctcctcaaaagagaattcagtctacagccatttaaatgatcattgctgctacagaagtgctttaagagaattgcctgaaacatctgtattatatcggccacctgccaatcacagctttactctttcaggtcactctggggctgcctcttgcatgtattactaaataaaatgatctctctttctctctctctctctcttttctaagaaacaattatgtgcactttgatacacaaccttctctaaccaactatatatcaagacccaaaaattgaagaaaaatattgttttctcatacagtgagcagatttttcaatctactaattctgtgacttgtcttggtgtgctagcctacaccttctctttggtttagttttccttttctataacactctgaattgctaatcttactaacacctatgatgttacctgaaatcaatctcccatatgtatgctgtatgctatgctaagactcctgaaatatacttactctgtgcttgtgtatgtgaatgttaatgcaactattacctagagtgaactttaagctttattgttgaatgtaattccattatatttccttttgtacacctgtgaaaaagtggagtagtgtttttttaaccattgttaatcagcttttgtgtatgaaagacacagtaaaatttctttcttaaatcaagatactggtgattcaaggaattttatttatggtccagccaagagccatctcgtgccaagacttctgctggcaagggaatggataaagctgttttgttctagtaacaattttggaatgaatactgacaatattccatgagggtgtgcaagcacaaattttaccaatctgacctctttgaagttgcagaatgctttgaaattctaatggtatctgaaatatcagctcatagaaagtaacaaaatttgctgtcaccttaaataagacattttaattttgttataatgtacaatttagaagtttgattaattatattatctatttaggcattaatataaaagaggtaggagtctgttatttaaaaaaagcattaaatttaaaaaaaaactgtcttgtctacttttagcttcattctcccatattttgaagggtgtgtaacttcagctctgcaggattgcatggggtaaaacttgttaccaacacatgtgaaccattgctacattgtaggttgtgatcattttgccccactgaagcccatgtatctgaccttacgtgccttttgaactaggagaatcgggctaatttattaatgatgataattataatgtatctgtacagcactttttacatttgcgaagtgctttccaatccatgttagttactagttattacagctgtaaggataaaacacgtcatgtggattcattttgaattggtgctattggtatttcctctgttattgctaataaatgaaaatggtggtatg

SEQ ID NO: 204 - protein, 947 aa, Homo sapiens
MEFSWGSGQESRRLLLLLLLLAAWEAGNGQLHYSVSEEAKHGTFVGRIAQDLGLELAELVPRLFRVASKGRGGLLEVNLQNGILFVNSRIDREELCRRSAECSIHLEVIVDRPLQVFHVDVEVRDINDNPPVFPATQKNLSIAESRPLDSRFPLEGASDADIGENALLTYRLSPNEYFSLEKPPDDELVKGLGLILRKSLDREEAPEIFLVLTATDGGKPELTGTVQLLITVLDANDNAPAFDRTIYKVRLLENVPNGTLVIKLNASDLDEGLNGDIVYSFSNDISPNVKSKFHIDPITGQIIVKGYIDFEESKSYEIIVEGIDKGQLPLSGHCRVIVEVEDNNDNVPDLEFKSLSLPIREDAPLGTVIALISVSDKDMGVNGLVTCSLTSHVPFKLVSTFKNYYSLVLDSALDRESVSAYELVVTARDGGSPSLWATASVSVEVADVNDNAPAFAQPEYTVFVKENNPPGCHIFTVSAWDADAQENALVSYSLVERRVGERALSSYVSVHAESGKVYALQPLDHEELELLQFQVTARDAGVPPLGSNVTLQVFVLDENDNAPALLAPRAGGTGGAVSELVPWSVGVGHVVAKVRAVDADSGYNAWLSYELQPGTGGARIPFRVGLYTGEISTTRALDETDAPRHRLLVLVKDHGEPALTATATVLVSLVESGQAPKASSRALVGAVGPDAALVDVNVYLIIAICAVSSLLVLTLLLYTALRCSALPTEGACAPGKPTLVCSSAVGSWSYSQQRRPRVCSGEGPPKTDLMAFSPSLPDSRDREDQLQTTEESFAKPRQPNPDWRYSASLRAGMHSSVHLEEAGILRAGPGGPDQQWPTVSSATPEPEAGEVSPPVGAGVNSNSWTFKYGPGNPKQSGPGELPDKFIIPGSPAIISIRQEPTNSQIDKSDFITFGKKEETKKKKKKKKGNKTQEKKEKGNSTTDNSDQ

SEQ ID NO: 205 - DNA, 5475 bp, Homo sapiens
caatgccggcgttcgggaggcgcaacgtcggcggtcgctgagtatccagcccgcagcagtgacggccggcaggagcgtgctcttccccgcggctcgtgctctccaggagtccggagcatggtcctgggtcaccgttggtgtagcgtgttggtggaacgtggacgcctagagggaggatggtgggctgtggggtggcagttttatgtttgtgggtttcctgcggcgctgcagcgggacagctcgagtactcagtgccggaggagacggagcggggcgtagccgtaggcaatctctccgcggacttgaggctgccagcggccgctatgtcctcgcggaactttcgcttcctttccagccaccgcgagctctacttcggggtggatctacccagcggcaatttggtggtcagagagccggcggaccgcgaacagctgtgcagggccaaagctgcctgcgtcttgacctacgacctggtgctcgaggacccgctggagctgcacaagattcggattcacgtcctggacaccaatgacaactcacctctctttcctgccggcgacgtgcagctgcacatccccgagttcctgacgcccggagcccgctttactctcccgaatgcccaagatgacgacgagggaagcaatgggatactaagctacagcctaagccccagtcagcactttcgcctggacatgggatcgcgggttgacggcagcgaatacccggagttggtgttggagaaagcactggatcgcgaacagcgcgccacccacctgctggtgcttacagctcgggacggcgggctacctgcccgctcaggagacgcacaagtcaccatcattgtggtggacacaaatgacaacgcgcctgtatttgagcgctccgtataccgcaccaaggttccagagactgcacccaatgggactgtgttattccgagttcaagccttggatccagatgaagggtccaatggggaagtccagtactccctaagcaacagcacgcaagcagagctgcgacaccgctttcacgtgcaccctaaaagtggggaggtgcaagtagctgcttcactaggtccgcctgaaacgctcttggaggcatacattgaggcgagggacgaaggtgtctttggtttagctagcaccgctaaactgctggtggaggtgactgacgtgaacgatcatgcccccgaactggacttcctgactctttcgaacccagtacctgaggacgctgcccctggcacagtgattgctctctttagtgtaaaggatgaagacctcgattctaatggtagggtcatttgtggcatgtctagtgcaggcccttttcagctgacggcttcctttgacaactactacagcctgctgattgatgggcccctggaccgggagcagatcagtgaataccaagtcctgatcacggcctcagatagtggctcacccccacttagcacccgaaggacaatcactgtgtcagttgctgatgtgaatgacaatacaccaaactttcctcaaccccagcaggaacttttcgttgctgaaaacaatggccctggggcctctctaggccgagtgtttgcccaggaccccgacctggggaagaatggccttgtctcttatgagctgttggatgttatctctgaagggccatcagcctctagcttgctggcagtggaatcatccagtggggccatcactgccaaaacttcctttgactttgagcagctcagggggtttcatttccaagtagaaggccgggatggtggcattcctcccagaagtgcaacagtgactataaacttgtttgtggtagataggaatgacaattatccggttatcttgtttcccttgcccagaaatggttctgtcccagtggaaattgtgccccgctctgccaggactggacacttggtcacaaaagtggtagcagaggatgctgacagtggttctaatgcctggctttcctaccacatctcccgggcgtctgactctagtctctttagaatttcagccaatataggtgagctccgtactgctcgcttagttcttcccactgatgcagttaagcagagggtggtggtagtggttcgggaccatggagacccaccactttcctcctctgtcactctgggtgtgctgttgagcaactctgtccctcagttacttccagactttgaagatgtctgggaaccaggagggcagctttctgcccagaacttgtatttagtaattgccttggcttgtatttcctttttatttctggggtgcttacttttcttcgtgtgtaccaagttgcaccagagcccaggctgttgcgctcagagctgctgtcgctctacagaggatctgaggtatggaagtaagatggtttcaaatccttgcatgacatcagccaccatagatgtcactacagttgagagactttctcagacttatctctatcgggcctctctgggacttggttctgataataacagtttgctgttgcgtggggagtacaatgctgccgacctgcgaaatcttgccactggggtaggactgaatttgccaatatcctgtattcagattcggaataggaaaggggatcacgctaatgtcaatgccatgccacgacagcccaaccctgactggcgttactctgcctccctgagagcaggcatgcacagctctgtgcacctagaggaggctggcattctacgggctggtccaggagggcctgatcagcagtggccaacagtatccagtgcaacaccagaaccagaggcaggagaagtgtcccctccagtcggtgcgggtgtcaacagcaacagctggacctttaaatacggaccaggcaaccccaaacaatccggtcccggtgagttgcccgacaaattcattatcccaggatctcctgcaatcatctccatccggcaggagcctactaacagccaaattgacaaaagtgacttcataaccttcggcaaaaaggaggagaccaagaaaaagaagaaaaagaagaagggtaacaagacccaggagaaaaaagagaaagggaacagcacgactgacaacagtgaccagtgaggtcctcaaatggaaacaagccacttagccagtttttgtaataatggcaaatctctcccatgtagcaattccctgctcctttttcctatctacatgagccctcttagagacctcagaaatctgcagaaagttccctgtgtctgtctagaacgcatttaacaggttttgtcgtaaaagctttactaagtctggtgttaactctttctctccactctggcttgttttcagaacctaaaaagcagacccaagtttcctttctcctccgccgcaaaggagaggcttcccagccccgccagtgagaggttggactctctgccctgtgctccggggatcctgtcttgatgacacttgcagggcaggctgaaaagttttgagattgagcagcttgggagtttgtggccactgggtatgtgtggctaccgcgggtatgcgagtgccagatattggctgagacgagccagcttagactaattggtacaaggaaggcaagaaaacaaagacaaataaacagcggaagttatcagtatggaggggaagtgtaaacttaaagggaccagactttctaaatcttacaactcaagaggtggcagccaccctctaggagacaaaactacccccactgacaaggctttaggagaccctaaagtctgttggctgtgacgtcattatacctaaaatctgcatcatacctgcaagccaacagttcagtgttttaacagagaaccaccctgggaaacagaagcagatctgatgtgtttcctatacatgtcctgtgctcactttattaaaaattcttttgcacacaatgtttatgaaaaggccagatccttttccaatacttatgcaaaagcaaaagaaaaccccgacacctcacctttcgctgtttgttgtttcatagatttatttaaaaaaagagaaagtctatagctataaatctttaaagagaaatatgaatacaattcccctaaactctcctcaaaagagaattcagtctacagccatttaaatgatcattgctgctacagaagtgctttaagagaattgcctgaaacatctgtattatatcggccacctgccaatcacagctttactctttcaggtcactctggggctgcctcttgcatgtattactaaataaaatgatctctctttctctctctctctctcttttctaagaaacaattatgtgcactttgatacacaaccttctctaaccaactatatatcaagacccaaaaattgaagaaaaatattgttttctcatacagtgagcagatttttcaatctactaattctgtgacttgtcttggtgtgctagcctacaccttctctttggtttagttttccttttctataacactctgaattgctaatcttactaacacctatgatgttacctgaaatcaatctcccatatgtatgctgtatgctatgctaagactcctgaaatatacttactctgtgcttgtgtatgtgaatgttaatgcaactattacctagagtgaactttaagctttattgttgaatgtaattccattatatttccttttgtacacctgtgaaaaagtggagtagtgtttttttaaccattgttaatcagcttttgtgtatgaaagacacagtaaaatttctttcttaaatcaagatactggtgattcaaggaattttatttatggtccagccaagagccatctcgtgccaagacttctgctggcaagggaatggataaagctgttttgttctagtaacaattttggaatgaatactgacaatattccatgagggtgtgcaagcacaaattttaccaatctgacctctttgaagttgcagaatgctttgaaattctaatggtatctgaaatatcagctcatagaaagtaacaaaatttgctgtcaccttaaataagacattttaattttgttataatgtacaatttagaagtttgattaattatattatctatttaggcattaatataaaagaggtaggagtctgttatttaaaaaaagcattaaatttaaaaaaaaactgtcttgtctacttttagcttcattctcccatattttgaagggtgtgtaacttcagctctgcaggattgcatggggtaaaacttgttaccaacacatgtgaaccattgctacattgtaggttgtgatcattttgccccactgaagcccatgtatctgaccttacgtgccttttgaactaggagaatcgggctaatttattaatgatgataattataatgtatctgtacagcactttttacatttgcgaagtgctttccaatccatgttagttactagttattacagctgtaaggataaaacacgtcatgtggattcattttgaattggtgctattggtatttcctctgttattgctaataaatgaaaatggtggtatg

SEQ ID NO: 206 - protein, 963 aa, Homo sapiens
MVGCGVAVLCLWVSCGAAAGQLEYSVPEETERGVAVGNLSADLRLPAAAMSSRNFRFLSSHRELYFGVDLPSGNLVVREPADREQLCRAKAACVLTYDLVLEDPLELHKIRIHVLDTNDNSPLFPAGDVQLHIPEFLTPGARFTLPNAQDDDEGSNGILSYSLSPSQHFRLDMGSRVDGSEYPELVLEKALDREQRATHLLVLTARDGGLPARSGDAQVTIIVVDTNDNAPVFERSVYRTKVPETAPNGTVLFRVQALDPDEGSNGEVQYSLSNSTQAELRHRFHVHPKSGEVQVAASLGPPETLLEAYIEARDEGVFGLASTAKLLVEVTDVNDHAPELDFLTLSNPVPEDAAPGTVIALFSVKDEDLDSNGRVICGMSSAGPFQLTASFDNYYSLLIDGPLDREQISEYQVLITASDSGSPPLSTRRTITVSVADVNDNTPNFPQPQQELFVAENNGPGASLGRVFAQDPDLGKNGLVSYELLDVISEGPSASSLLAVESSSGAITAKTSFDFEQLRGFHFQVEGRDGGIPPRSATVTINLFVVDRNDNYPVILFPLPRNGSVPVEIVPRSARTGHLVTKVVAEDADSGSNAWLSYHISRASDSSLFRISANIGELRTARLVLPTDAVKQRVVVVVRDHGDPPLSSSVTLGVLLSNSVPQLLPDFEDVWEPGGQLSAQNLYLVIALACISFLFLGCLLFFVCTKLHQSPGCCAQSCCRSTEDLRYGSKMVSNPCMTSATIDVTTVERLSQTYLYRASLGLGSDNNSLLLRGEYNAADLRNLATGVGLNLPISCIQIRNRKGDHANVNAMPRQPNPDWRYSASLRAGMHSSVHLEEAGILRAGPGGPDQQWPTVSSATPEPEAGEVSPPVGAGVNSNSWTFKYGPGNPKQSGPGELPDKFIIPGSPAIISIRQEPTNSQIDKSDFITFGKKEETKKKKKKKKGNKTQEKKEKGNSTTDNSDQ

SEQ ID NO: 207 - DNA, 1756 bp, Homo sapiens
gccaagggaaactgccgcgaggaggcggaaggagcagaggaccggcagccggcgtcgaggcggggcgcgggaacgacggcggccatggcggcctcggggcccgggtgtcgcagctggtgcttgtgtcccgaggtgccatccgccaccttcttcactgcgctgctctcgctgctggtttccgggcctcgcctgttcctgctgcagcagcccctggcgccctcgggcctcacgctgaagtccgaggcccttcgcaactggcaagtttacaggctggtaacctacatctttgtctacgagaatcccatctccctgctctgcggcgctatcatcatctggcgctttgctggcaatttcgagagaaccgtgggcaccgtccgccactgcttcttcaccgtgatcttcgccatcttctccgctatcatcttcctgtcattcgaggctgtgtcatcactgtcaaagctgggggaagtggaggatgccagaggtttcaccccagtggcctttgccatgctgggagtcaccaccgtccgttctcggatgaggcgggccctggtgtttggcatggttgtgccctcagtcctggttccgtggctcctgctgggtgcctcgtggctcattccccagacctctttcctcagtaatgtctgcgggctgtccatcgggctggcctatggcctcacctactgctattccatcgacctctcagagcgagtggcactgaagctcgatcagaccttccccttcagcctgatgaggaggatatccgtgttcaagtacgtctcagggtcttcagccgagaggagggcagcccagagccggaaactgaacccggtgcctggctcctaccccacacagagctgccaccctcacctgtccccaagccaccctgtgtcccagacgcagcacgccagtggtcagaagctggcctcctggccctcctgcacccccgggcacatgcccaccttgcctccgtaccagcctgcctccggcctgtgctatgtgcagaaccactttggtccaaaccccacctcctccagtgtctacccagcttctgcgggcacctccctgggcatccagccccccacgcctgtgaacagccctggcacggtgtattctggggccttgggcacaccaggggctgcaggctccaaggagtcctccagggtccccatgccctgagagaatttctagggaagtcatctcacttggccttctgaaggtcctccctaagagtctcctgacaaaagttacttattgaacacctctatgtgccaggctctgtgttgggtactttgatcaatgcccctgtttcagtctcatctgtactcacggcagccctgtggagtacggtgtactggcccagcttacagatgcagaaagcgagacgttctgccatcagataaagtcacgtggctctttagtaacacggacaaggctcctcgccaaggaactcgtggcagaagagggcagcagttggcagtagctgccgatgtctgtccccagctccaccattcctccctgtggctgtgccgtgctcgtggtttcagtgtccgtgtgtccatgtgtctgcccttcaggagctcgcagctggtgtgcttggcggtcccaggcctgtgtagtgtctctcccctgctgcgggcgcccccaccccgattcctctccccagaagcggtgggatgggcccccatgaactgcagcagcatgctgaggtgtccatgttgtctgcctttgtataaagaaacagcctctgacctgc

SEQ ID NO: 208 - protein, 364 aa, Homo sapiens
MAASGPGCRSWCLCPEVPSATFFTALLSLLVSGPRLFLLQQPLAPSGLTLKSEALRNWQVYRLVTYIFVYENPISLLCGAIIIWRFAGNFERTVGTVRHCFFTVIFAIFSAIIFLSFEAVSSLSKLGEVEDARGFTPVAFAMLGVTTVRSRMRRALVFGMVVPSVLVPWLLLGASWLIPQTSFLSNVCGLSIGLAYGLTYCYSIDLSERVALKLDQTFPFSLMRRISVFKYVSGSSAERRAAQSRKLNPVPGSYPTQSCHPHLSPSHPVSQTQHASGQKLASWPSCTPGHMPTLPPYQPASGLCYVQNHFGPNPTSSSVYPASAGTSLGIQPPTPVNSPGTVYSGALGTPGAAGSKESSRVPMP

SEQ ID NO: 209 - DNA, 8501 bp, Homo sapiens
agacggcggcggcgcccgtaggatgcagggatcgctcccccggggccgctgagcctgcgcccagtgccccgagccccgcgccgagccgagtccgcgccaagcagcagccgcccaccccggggcccggccgggggaccagcagcttccccacaggcaacgtgaggagagcctgtgcccagaagcaggatgagaagatggcaaacttcctattacctcggggcaccagcagcttccgcaggttcacacgggagtccctggcagccatcgagaagcgcatggcagagaagcaagcccgcggctcaaccaccttgcaggagagccgagaggggctgcccgaggaggaggctccccggccccagctggacctgcaggcctccaaaaagctgccagatctctatggcaatccaccccaagagctcatcggagagcccctggaggacctggaccccttctatagcacccaaaagactttcatcgtactgaataaaggcaagaccatcttccggttcagtgccaccaacgccttgtatgtcctcagtcccttccaccccatccggagagcggctgtgaagattctggttcactcgctcttcaacatgctcatcatgtgcaccatcctcaccaactgcgtgttcatggcccagcacgaccctccaccctggaccaagtatgtcgagtacaccttcaccgccatttacacctttgagtctctggtcaagattctggctcgaggcttctgcctgcacgcgttcactttccttcgggacccatggaactggctggactttagtgtgattatcatggcatacacaactgaatttgtggacctgggcaatgtctcagccttacgcaccttccgagtcctccgggccctgaaaactatatcagtcatttcagggctgaagaccatcgtgggggccctgatccagtctgtgaagaagctggctgatgtgatggtcctcacagtcttctgcctcagcgtctttgccctcatcggcctgcagctcttcatgggcaacctaaggcacaagtgcgtgcgcaacttcacagcgctcaacggcaccaacggctccgtggaggccgacggcttggtctgggaatccctggacctttacctcagtgatccagaaaattacctgctcaagaacggcacctctgatgtgttactgtgtgggaacagctctgacgctgggacatgtccggagggctaccggtgcctaaaggcaggcgagaaccccgaccacggctacaccagcttcgattcctttgcctgggcctttcttgcactcttccgcctgatgacgcaggactgctgggagcgcctctatcagcagaccctcaggtccgcagggaagatctacatgatcttcttcatgcttgtcatcttcctggggtccttctacctggtgaacctgatcctggccgtggtcgcaatggcctatgaggagcaaaaccaagccaccatcgctgagaccgaggagaaggaaaagcgcttccaggaggccatggaaatgctcaagaaagaacacgaggccctcaccatcaggggtgtggataccgtgtcccgtagctccttggagatgtcccctttggccccagtaaacagccatgagagaagaagcaagaggagaaaacggatgtcttcaggaactgaggagtgtggggaggacaggctccccaagtctgactcagaagatggtcccagagcaatgaatcatctcagcctcacccgtggcctcagcaggacttctatgaagccacgttccagccgcgggagcattttcacctttcgcaggcgagacctgggttctgaagcagattttgcagatgatgaaaacagcacagcgggggagagcgagagccaccacacatcactgctggtgccctggcccctgcgccggaccagtgcccagggacagcccagtcccggaacctcggctcctggccacgccctccatggcaaaaagaacagcactgtggactgcaatggggtggtctcattactgggggcaggcgacccagaggccacatccccaggaagccacctcctccgccctgtgatgctagagcacccgccagacacgaccacgccatcggaggagccaggcgggccccagatgctgacctcccaggctccgtgtgtagatggcttcgaggagccaggagcacggcagcgggccctcagcgcagtcagcgtcctcaccagcgcactggaagagttagaggagtctcgccacaagtgtccaccatgctggaaccgtctcgcccagcgctacctgatctgggagtgctgcccgctgtggatgtccatcaagcagggagtgaagttggtggtcatggacccgtttactgacctcaccatcactatgtgcatcgtactcaacacactcttcatggcgctggagcactacaacatgacaagtgaattcgaggagatgctgcaggtcggaaacctggtcttcacagggattttcacagcagagatgaccttcaagatcattgccctcgacccctactactacttccaacagggctggaacatcttcgacagcatcatcgtcatccttagcctcatggagctgggcctgtcccgcatgagcaacttgtcggtgctgcgctccttccgcctgctgcgggtcttcaagctggccaaatcatggcccaccctgaacacactcatcaagatcatcgggaactcagtgggggcactggggaacctgacactggtgctagccatcatcgtgttcatctttgctgtggtgggcatgcagctctttggcaagaactactcggagctgagggacagcgactcaggcctgctgcctcgctggcacatgatggacttctttcatgccttcctcatcatcttccgcatcctctgtggagagtggatcgagaccatgtgggactgcatggaggtgtcggggcagtcattatgcctgctggtcttcttgcttgttatggtcattggcaaccttgtggtcctgaatctcttcctggccttgctgctcagctccttcagtgcagacaacctcacagcccctgatgaggacagagagatgaacaacctccagctggccctggcccgcatccagaggggcctgcgctttgtcaagcggaccacctgggatttctgctgtggtctcctgcggcagcggcctcagaagcccgcagcccttgccgcccagggccagctgcccagctgcattgccaccccctactccccgccacccccagagacggagaaggtgcctcccacccgcaaggaaacacggtttgaggaaggcgagcaaccaggccagggcacccccggggatccagagcccgtgtgtgtgcccatcgctgtggccgagtcagacacagatgaccaagaagaagatgaggagaacagcctgggcacggaggaggagtccagcaagcaggaatcccagcctgtgtccggtggcccagaggcccctccggattccaggacctggagccaggtgtcagcgactgcctcctctgaggccgaggccagtgcatctcaggccgactggcggcagcagtggaaagcggaaccccaggccccagggtgcggtgagaccccagaggacagttgctccgagggcagcacagcagacatgaccaacaccgctgagctcctggagcagatccctgacctcggccaggatgtcaaggacccagaggactgcttcactgaaggctgtgtccggcgctgtccctgctgtgcggtggacaccacacaggccccagggaaggtctggtggcggttgcgcaagacctgctaccacatcgtggagcacagctggttcgagacattcatcatcttcatgatcctactcagcagtggagcgctggccttcgaggacatctacctagaggagcggaagaccatcaaggttctgcttgagtatgccgacaagatgttcacatatgtcttcgtgctggagatgctgctcaagtgggtggcctacggcttcaagaagtacttcaccaatgcctggtgctggctcgacttcctcatcgtagacgtctctctggtcagcctggtggccaacaccctgggctttgccgagatgggccccatcaagtcactgcggacgctgcgtgcactccgtcctctgagagctctgtcacgatttgagggcatgagggtggtggtcaatgccctggtgggcgccatcccgtccatcatgaacgtcctcctcgtctgcctcatcttctggctcatcttcagcatcatgggcgtgaacctctttgcggggaagtttgggaggtgcatcaaccagacagagggagacttgcctttgaactacaccatcgtgaacaacaagagccagtgtgagtccttgaacttgaccggagaattgtactggaccaaggtgaaagtcaactttgacaacgtgggggccgggtacctggcccttctgcaggtggcaacatttaaaggctggatggacattatgtatgcagctgtggactccagggggtatgaagagcagcctcagtgggaatacaacctctacatgtacatctattttgtcattttcatcatctttgggtctttcttcaccctgaacctctttattggtgtcatcattgacaacttcaaccaacagaagaaaaagttagggggccaggacatcttcatgacagaggagcagaagaagtactacaatgccatgaagaagctgggctccaagaagccccagaagcccatcccacggcccctgaacaagtaccagggcttcatattcgacattgtgaccaagcaggcctttgacgtcaccatcatgtttctgatctgcttgaatatggtgaccatgatggtggagacagatgaccaaagtcctgagaaaatcaacatcttggccaagatcaacctgctctttgtggccatcttcacaggcgagtgtattgtcaagctggctgccctgcgccactactacttcaccaacagctggaatatcttcgacttcgtggttgtcatcctctccatcgtgggcactgtgctctcggacatcatccagaagtacttcttctccccgacgctcttccgagtcatccgcctggcccgaataggccgcatcctcagactgatccgaggggccaaggggatccgcacgctgctctttgccctcatgatgtccctgcctgccctcttcaacatcgggctgctgctcttcctcgtcatgttcatctactccatctttggcatggccaacttcgcttatgtcaagtgggaggctggcatcgacgacatgttcaacttccagaccttcgccaacagcatgctgtgcctcttccagatcaccacgtcggccggctgggatggcctcctcagccccatcctcaacactgggccgccctactgcgaccccactctgcccaacagcaatggctctcggggggactgcgggagcccagccgtgggcatcctcttcttcaccacctacatcatcatctccttcctcatcgtggtcaacatgtacattgccatcatcctggagaacttcagcgtggccacggaggagagcaccgagcccctgagtgaggacgacttcgatatgttctatgagatctgggagaaatttgacccagaggccactcagtttattgagtattcggtcctgtctgactttgccgatgccctgtctgagccactccgtatcgccaagcccaaccagataagcctcatcaacatggacctgcccatggtgagtggggaccgcatccattgcatggacattctctttgccttcaccaaaagggtcctgggggagtctggggagatggacgccctgaagatccagatggaggagaagttcatggcagccaacccatccaagatctcctacgagcccatcaccaccacactccggcgcaagcacgaagaggtgtcggccatggttatccagagagccttccgcaggcacctgctgcaacgctctttgaagcatgcctccttcctcttccgtcagcaggcgggcagcggcctctccgaagaggatgcccctgagcgagagggcctcatcgcctacgtgatgagtgagaacttctcccgaccccttggcccaccctccagctcctccatctcctccacttccttcccaccctcctatgacagtgtcactagagccaccagcgataacctccaggtgcgggggtctgactacagccacagtgaagatctcgccgacttccccccttctccggacagggaccgtgagtccatcgtgtgagcctcggcctggctggccaggacacactgaaaagcagcctttttcaccatggcaaacctaaatgcagtcagtcacaaaccagcctggggccttcctggctttgggagtaagaaatgggcctcagccccgcggatcaaccaggcagagttctgtggcgccgcgtggacagccggagcagttggcctgtgcttggaggcctcagatagacctgtgacctggtctggtcaggcaatgccctgcggctctggaaagcaacttcatcccagctgctgaggcgaaatataaaactgagactgtatatgttgtgaatgggctttcataaatttattatatttgatatttttttacttgagcaaagaactaaggatttttccatggacatgggcagcaattcacgctgtctcttcttaaccctgaacaagagtgtctatggagcagccggaagtctgttctcaaagcagaagtggaatccagtgtggctcccacaggtcttcactgcccaggggtcgaatggggtccccctcccacttgacctgagatgctgggagggctgaacccccactcacacaagcacacacacacagtcctcacacacggaggccagacacaggccgtgggacccaggctcccagcctaagggagacaggcctttccctgccggccccccaaggatggggttcttgtccacggggctcactctggccccctattgtctccaaggtcccattttccccctgtgttttcacgcaggtcatattgtcagtcctacaaaaataaaaggcttccagaggagagtggcctgggtcccagggctggccctaggcactgatagttgccttttcttcccctcctgtaagagtattaacaaaaccaaaggacacaagggtgcaagccccattcacggcctggcatgcagcttgtccttgctcctggaacctggcaggccctgcccagccagccatcggaagagagggctgagccatgggggtttggggctaagaagttcaccagccctgagccatggcggcccctcagcctgcctgaagagaggaaactggcgatctcccagggctctctggaccatacgcggaggagttttctgtgtggtctccagctcctctccagacacagagacatgggagtggggagcggagcttggccctgcgccctgtgcagggaaagggatggtcaggcccagttctcgtgcccttagaggggaatgaaccatggcacctttgagagagggggcactgtggtcaggcccagcctctctggctcagcccgggatcctgatggcacccacacagaggacctctttggggcaagatccaggtggtcccataggtcttgtgaaaaggctttttcagggaaaaatattttactagtccaatcacccccaggacctcttcagctgctgacaatcctatttagcatatgcaaatcttttaacatagagaactgtcaccctgaggtaacagggtcaactggcgaagcctgagcaggcaggggcttggctgccccattccagctctcccatggagcccctccaccgggcgcatgcctcccaggccacctcagtctcacctgccggctctgggctggctgctcctaacctacctcgccgagctgtcggagggctggacatttgtggcagtgctgaagggggcattgccggcgagtaaagtattatgtttcttcttgtcaccccagttcccttggtggcaaccccagacccaacccatgcccctgacagatctagttctcttctcctgtgttccctttgagtccagtgtgggacacggtttaactgtcccagcgacatttctccaagtggaaatcctatttttgtagatctccatgctttgctctcaaggcttggagaggtatgtgcccctcctgggtgctcaccgcctgctacacaggcaggaatgcggttgggaggcaggtcgggctgccagcccagctggccggaaggagactgtggtttttgtgtgtgtggacagcccgggagctttgagacaggtgcctggggctggctgcagacggtgtggttgggggtgggaggtgagctagacccaacccttagcttttagcctggctgtcacctttttaatttccagaactgcacaatgaccagcaggagggaaggacagacatcaagtgccagatgttgtctgaactaatcgagcacttctcaccaaacttcatgtataaataaaatacatatttttaaaacaaaccaataaatggcttacatga

SEQ ID NO: 210 - protein, 2016 aa, Homo sapiens [sequence omitted]

SEQ ID NO: 211 - DNA, 1925 bp, Homo sapiens
gtttttacccaggcctcggcgcctaggcgcttcgccgaggctgatcttcgttcaagtgtgagctgcggctgagcccagcgctcgaggcgcgaggcagccaggagggcccgtgcggcgcggggagccagcgagcgcgccttcggcattggccgccgcgatgtcagctcagtgctgtgcgggccagctggcctgctgctgtgggtctgcaggctgctctctctgctgtgattgctgccccaggattcggcagtccctcagcacccgcttcatgtacgccctctacttcattctggtcgtcgtcctctgctgcatcatgatgtcaacaaccgtggctcacaagatgaaagagcacattcctttttttgaagatatgtgtaaaggcattaaagctggtgacacctgtgagaagctggtgggatattctgccgtgtatagagtctgttttggaatggcttgtttcttctttatcttctgtctactgaccttgaaaatcaacaacagcaaaagttgtagagctcatattcacaatggcttttggttctttaaacttctgctgttgggggccatgtgctcaggagctttcttcattccagatcaggacacctttctgaacgcctggcgctatgtgggagccgtcggaggcttcctcttcattggcatccagctcctcctgctcgtggagtttgcacataagtggaacaagaactggacagcaggcacagccagtaacaagctgtggtacgcctccctggccctggtgacgctcatcatgtattccattgccactggaggcttggttttgatggcagtgttttatacacagaaagacagctgcatggaaaacaaaattctgctgggagtaaatggaggcctgtgcctgcttatatcattggtagccatctcaccctgggtccaaaatcgacagccacactcggggctcttacaatcaggggtcataagctgctatgtcacctacctcaccttctcagctctgtccagcaaacctgcagaagtagttctagatgaacatgggaaaaatgttacaatctgtgtgcctgactttggtcaagacctgtacagagatgaaaacttggtgactatactggggaccagcctcttaatcggatgtatcttgtattcatgtttgacatcaacaacaagatcgagttctgacgctctgcaggggcgatacgcagctcctgaattggagatagctcgctgttgtttttgcttcagtcctggtggagaggacactgaagagcagcagccggggaaggagggaccacgggtcatttatgacgagaagaaaggcaccgtctacatctactcctacttccacttcgtgttcttcctagcttccctgtatgtgatgatgaccgtcaccaactggttcaaaagtgcctttcacctcctgccatgattctgaggcctccccagccatgtggaactctgagaaacctgaacggactccatttggctccttcatttgcaagacatcaagggctccttacccacccccttcctcaaggaattaacttgtgcaagctgactcccagcacatcaaagaatgcaattaactgataacatgctgtggcaagctatgtccgcagttcccaggaatttgtccagttgatattaccctaagcccctgtgtttttgtctggttgatagcacccaaagcccagcgtctatcaccttgtgatggatttaaagcccctgcacctggaactgtttgctttcctgtaaccatttgtctttttaacttcttttgcctgttttacttctgtaagactgctacagctaggctccccctcccctctctaaaccaaagtataaaacaaaatctagccccttcttcagggccgagagaattttgagcactagccgtctctcggtcgctggctaataaaggactcctcaattcg

SEQ ID NO: 212 - protein, 423 aa, Homo sapiens
MSAQCCAGQLACCCGSAGCSLCCDCCPRIRQSLSTRFMYALYFILVVVLCCIMMSTTVAHKMKEHIPFFEDMCKGIKAGDTCEKLVGYSAVYRVCFGMACFFFIFCLLTLKINNSKSCRAHIHNGFWFFKLLLLGAMCSGAFFIPDQDTFLNAWRYVGAVGGFLFIGIQLLLLVEFAHKWNKNWTAGTASNKLWYASLALVTLIMYSIATGGLVLMAVFYTQKDSCMENKILLGVNGGLCLLISLVAISPWVQNRQPHSGLLQSGVISCYVTYLTFSALSSKPAEVVLDEHGKNVTICVPDFGQDLYRDENLVTILGTSLLIGCILYSCLTSTTRSSSDALQGRYAAPELEIARCCFCFSPGGEDTEEQQPGKEGPRVIYDEKKGTVYIYSYFHFVFFLASLYVMMTVTNWFNHVRSAFHLLP

SEQ ID NO: 213 - DNA, 4717 bp, Homo sapiens
tacatttcctcagaagaaggctccttggtgctttgaagaacatcctgaagattatatcggagacaatatatcaagaatctatttattgaatcatctagaacaaaagccaggagctccctaatggaagcacattagtgtttattttgatgaagaaatatatagattttttaaaacaaccacaaagtagatagctcagtaaaaaatcaattttggaagatgtcactgaacaactcttccaatgtatttctggattcagtgcccagtaataccaatcgctttcaagttagtgtcataaatgagaaccatgagagcagtgcagctgcagatgacaatactgacccaccacattatgaagaaacctcttttggggatgaagctcagaaaagactcagaatcagctttaggcctgggaatcaggagtgctatgacaatttcctccaaagtggagaaactgctaaaacagatgccagttttcacgcttatgattctcacacaaacacatactatctacaaacttttggccacaacaccatggatgccgttcccaagatagagtactatcgtaacaccggcagcatcagtgggcccaaggtcaaccgacccagcctgcttgagattcacgagcaactcgcaaagaatgtggcagtcaccccaagttcagctgacagagttgctaacggtgatgggatacctggagatgaacaagctgaaaataaggaagatgatcaagctggtgttgtgaagtttggatgggtgaaaggtgtgctggtaagatgcatgctgaacatctggggagtcatgctcttcattcgcctctcctggattgttggagaagctggaattggtcttggagttctcataattcttctttccaccatggtaacttctattactgggttgtcaacttctgcgatagcaactaacgggtttgttcgtggaggtggggcctactatcttatttccagaagtttagggcccgagttcggtgggtcaataggcctgatctttgcttttgctaatgcagtggctgttgctatgtatgtggtgggatttgctgagactgtagtagatcttcttaaggagagtgattcgatgatggtggatccaaccaatgacatccggattataggctccatcacagtggtgattcttctaggaatttcagtagctggaatggaatgggaggcaaaggcccaagtcattcttctggtcattcttctaattgctattgcaaacttcttcattggaactgtcattccatccaacaatgagaaaaagtccagaggtttctttaattaccaagcatcaatatttgcagaaaactttgggccacgcttcacaaagggtgaaggcttcttctctgtctttgccatttttttcccagcagctactgggattcttgctggtgccaatatctcaggagatttggaggatccccaagatgccatccccagaggaaccatgctggccattttcatcaccactgttgcctacttaggggttgcaatttgtgtaggggcctgtgtggtccgagatgccaccgggaacatgaatgacaccatcatttctgggatgaactgcaatggttcagcagcatgtgggttgggctatgacttctcaagatgtcgacatgaaccatgtcagtacgggctgatgaacaatttccaggtcatgagcatggtatcagggttcggccccctcatcactgcgggaatcttttctgcaacactctcctccgccctggcctcccttgtcagcgcacccaaagtgttccaggctctgtgcaaggacaacatctacaaagccctgcagttttttgcaaagggatatgggaaaaacaatgaacccctgagaggatatattctcacttttcttatagccatggcatttattcttattgcggaactgaacaccattgctcccatcatctccaactttttcctggcctcatatgcacttattaatttctcctgcttccatgcctcttatgccaaatctccaggatggagacctgcgtatggaatttacaacatgtgggtatctctttttggagctgttttgtgctgtgcagtcatgtttgtcatcaactggtgggcagctgtcatcacctatgtcattgaattcttcctttacgtctatgtgacttgtaagaagccagatgtgaactggggctcctccacacaggctctttcctacgtgagtgctttagacaatgctctggaattaaccacagtggaagaccacgtaaaaaacttcaggccccagtgcattgtcttaacagggggacccatgacaagacctgctctcctggacataactcacgcctttaccaagaacagtggcctttgcatctgctgtgaagtctttgtgggaccgcgcaaactgtgtgttaaggagatgaacagtggcatggcgaaaaaacaggcctggcttataaagaacaaaatcaaggctttttatgctgcagtggcggcagactgtttcagggatggtgtccgaagtcttcttcaggcctcaggcttaggaagaatgaaaccaaacactctggtgattggatataagaaaaactggaggaaagctcccttgacagagattgagaactacgtgggaatcatacatgatgcatttgattttgagattggcgtggttatagtcagaatcagccaaggatttgacatctctcaggttcttcaggtgcaagaggaattagagagattagaacaggagagactagcattggaagcgactatcaaagataatgagtgtgaagaggaaagtggaggcatccgaggcttgtttaaaaaagctggcaagttgaacattactaagacaacgcctaaaaaagatggcagcattaacacaagccagtcgatgcatgtgggagagttcaaccagaaactggtggaagccagcactcaatttaaaaagaaacaagaaaaaggcacaattgatgtttggtggttgtttgatgatggagggttaacacttcttatcccctatatcttaactctcagaaaaaaatggaaagactgtaaattaagaatctatgtgggagggaagatcaaccgcattgaagaagaaaaaattgtaatggcttcccttctgagcaaatttaggataaaatttgcagacatccatatcatcggtgacatcaacattaggccaaacaaagagagctggaaagtctttgaagagatgattgaaccatatcgtctccatgaaagctgcaaagatttaacaactgctgagaaattaaaaagagaaactccgtggaaaattacagatgcagaactggaagcagtcaaggaaaagagttaccgccaagttcgactgaatgaactcttacaggagcactccagagctgctaatctcattgtcctgagccttcccgtggcaagaaagggatccatatcggatttgttgtatatggcttggttggaaatcctcacaaagaacctcccacctgtcttactagttagaggaaatcacaaaaatgtcttgacattttactcttaaaacatgaaagattggaatacattttaacttaatgtaatgcataattaagaaacatgttccagtactttatgttgtaaatctgatctatggatatgcaaacctctggagaggatcctaccagattctacatacattgcataatttttatcagttaatgcgagcttttttttctcttctcagcttaaggggttgtcaaagccaatgttatccctagaaaaacatttttgtcactgctgttgataaacaagaaaatcaaggaaactcatgttggcttatgctcatgaaaaccaccaatgtgattgtaaacttctccagacaaacttaaccttttgtttcttaattttttgttttgagtgtttgcttctcagccctggtataggtctcagccccacagcaggatctcaataaatgcttattgacaggctggcatagtaaccacaggtggttatcaaaggaaaagaccaataggctggggaacataattatgcttggccccctcagaggcttatacctccaaagcagatttaaaaatcagtaactcaaaactttaagaagtagttgagtctacaaaatattcaaagcagttacctaaataaggttatttaatgtaacagattatatacttaaagtgatctgagcaatcattgataacatatggcttaaatttgctgctgcctgaaaagtatattaactagattagaagacaccatatactccaataaaatgaaatatattctattctcaatatataaactttaattgtactccctatcaaatattttgaaatttccatcacggcattactttgcatatttttttctaattaaatggttagtacagatgaaatctttatagatgactacttgaaaactaagtgctacaaattttcaaaccattattaagaaatatatcctgaatcatatatttagttactttctatagtgattgtatggatttaaaagaataattaaaatgtgaagttgaaaaacttgtaaaatttggaatatacagatactgatttttttcatttttgttagtatacctataatacataatcacattgacaaaccaatgaaaatattgattttctgatgaatggcttgatttttctccttgacatgttttgactgttcattctaactgaaaacatatatgggaaaatatgaacctgaaataaaagcactcaaattcaaaaaaaaaa

SEQ ID NO: 214 - protein, 1099 aa, Homo sapiens
MSLNNSSNVFLDSVPSNTNRFQVSVINENHESSAAADDNTDPPHYEETSFGDEAQKRLRISFRPGNQECYDNFLQSGETAKTDASFHAYDSHTNTYYLQTFGHNTMDAVPKIEYYRNTGSISGPKVNRPSLLEIHEQLAKNVAVTPSSADRVANGDGIPGDEQAENKEDDQAGVVKFGWVKGVLVRCMLNIWGVMLFIRLSWIVGEAGIGLGVLIILLSTMVTSITGLSTSAIATNGFVRGGGAYYLISRSLGPEFGGSIGLIFAFANAVAVAMYVVGFAETVVDLLKESDSMMVDPTNDIRIIGSITVVILLGISVAGMEWEAKAQVILLVILLIAIANFFIGTVIPSNNEKKSRGFFNYQASIFAENFGPRFTKGEGFFSVFAIFFPAATGILAGANISGDLEDPQDAIPRGTMLAIFITTVAYLGVAICVGACVVRDATGNMNDTIISGMNCNGSAACGLGYDFSRCRHEPCQYGLMNNFQVMSMVSGFGPLITAGIFSATLSSALASLVSAPKVFQALCKDNIYKALQFFAKGYGKNNEPLRGYILTFLIAMAFILIAELNTIAPIISNFFLASYALINFSCFHASYAKSPGWRPAYGIYNMWVSLFGAVLCCAVMFVINWWAAVITYVIEFFLYVYVTCKKPDVNWGSSTQALSYVSALDNALELTTVEDHVKNFRPQCIVLTGGPMTRPALLDITHAFTKNSGLCICCEVFVGPRKLCVKEMNSGMAKKQAWLIKNKIKAFYAAVAADCFRDGVRSLLQASGLGRMKPNTLVIGYKKNWRKAPLTEIENYVGIIHDAFDFEIGVVIVRISQGFDISQVLQVQEELERLEQERLALEATIKDNECEEESGGIRGLFKKAGKLNITKTTPKKDGSINTSQSMHVGEFNQKLVEASTQFKKKQEKGTIDVWWLFDDGGLTLLIPYILTLRKKWKDCKLRIYVGGKINRIEEEKIVMASLLSKFRIKFADIHIIGDINIRPNKESWKVFEEMIEPYRLHESCKDLTTAEKLKRETPWKITDAELEAVKEKSYRQVRLNELLQEHSRAANLIVLSLPVARKGSISDLLYMAWLEILTKNLPPVLLVRGNHKNVLTFYS

SEQ ID NO: 215 - DNA, 6505 bp, Homo sapiens
acagcgcaagccccacgccacgcgtcgctggtcccaggcagcgagtcgctcgcgcgccccgccgcccgcctggcgacagctccgccgcgcacgcacatggaggggagcgcgagccccccggaaaagccccgcgcccgccctgcggctgccgtgctgtgccggggcccggtagagccgctggtcttcctggccaactttgccttggtcctgcagggcccgctcaccacgcagtatctgtggcaccgcttcagcgccgacctcggctacaatggcacccgccaaagggggggctgcagcaaccgcagcgcggaccccaccatgcaggaagtggagacccttacctcccactggaccctctacatgaacgtgggcggcttcctggtggggctcttctcgtccaccctgctgggagcttggagcgacagtgtgggccgccgcccgctgctagtgctggcctcgctgggcctgctgctccaggccctagtgtccgtttttgtggtgcagctgcagctccacgtcggctacttcgtgctgggtcgcatcctttgtgccctcctcggcgacttcggtggccttctggctgctagctttgcgtccgtggcagatgtcagctccagtcgcagccgcaccttccggatggccctgctggaagccagcatcggggtggctgggatgctggcaagcctcctcgggggccactggctccgggcccagggttatgccaaccccttctggctggccttggccttgctgatagccatgactctctatgcagctttctgctttggtgagaccttaaaggagccaaagtccacccggctcttcacgttccgtcaccaccgatccattgtccagctctatgtggctcccgccccagagaagtccaggaaacatttagccctctactcactggccatcttcgtggtgatcactgtgcactttggggcccaggacatcttaaccctttatgaactaagcacacccctctgctgggactccaaactaatcggctatggttctgcagctcagcatctcccctacctcaccagcctgctggccctgaagctcctgcagtactgcctggccgatgcctgggtagctgagatcggcctggccttcaacatcctggggatggtggtctttgcctttgccactatcacgcctctcatgttcacaggatatgggttgcttttcctgtcattagtcatcacacctgtcatccgggctaaactctccaagctggtgagagagacagagcagggtgctctcttttctgctgtggcctgtgtgaatagcctggccatgctgacggcctccggcatcttcaactcactctacccagccactctgaactttatgaaggggttccccttcctcctgggagctggcctcctgctcatcccggctgttctgattgggatgctggaaaaggctgatcctcacctcgagttccagcagtttccccagagcccctgatctgcctggaccagaagacagagggcaagaggagcaaagtgaacaccaagcaactggaggtctgcagctggaagcccagcccacagcaggacaagcaactcttgtctaagggcagtgctctctttggacgaggtagtcaagagagaccaaggcaccaccccatccacagctgacccagcctctgtctaggatctagaatcataacccacacaggcccactgcaggacaggtggcagaggagctatttgggacaggagtcagttctccctttctgctatccatcacttataaccccacaggccagaggagaggtcctgagagaggtgacacttcagggaccagaggcagcacgagggctggcatctctccttccagcccaaactgcacagccccaaccaggttcccaacacgtgtagcagtcatcagccattccttaacaatgaatgtggtacctggttagtgccagccttgggaaggagggagggaggtaagaggggcttggtgatctctggaggaagagtgttgcctttgctgtggttggggaatcgatccttggctatggcctacccactcccctggctgaagagtgccaatcattacaaatcagcttcagcaaactgaaacaaaccttctggtgccttgggctttggggccctctgttttcctgctcccagtctgcctgccatacgttagacaacagaagctgctgggctgggcaggagccctgagctgcctggtggattggtaccaagtggggccagccagggcttctactgactcgctgtgcaaccttgagcaagccccactaggaacggctagatcagcaatgccccaaattgttgaatcgtggtgatcacatttggatggacaagttaggaaacttagctgattctctgagatacttcccacttcctcatacattctacaatgagatgcctctcttcatgggcctggggaaaggatgaatgagtgtggctggacttttgacctttaatgtccctgagcagttcttggcccttggggagaagtagggggaggatctggctgactcagccccaaccgaggggtagcagctgcagcccagccaagcagaacaccctggccctacagacctgtgtctgagcaggctttggaggaaaggccacttctgagtcctctgtctcaggagaagccaggcctaggtgcttgacctggtgatctgagctgtgtttgtcctagtatgggtggcagtcacctctgaacacactggccttggcttagaggaggcttgtgacttcagctgttccagctggggctggatgctggactctgattccctcagagagacagaagatcgggcagaggtcaaccagaaggccacacagggcagtggacaacagtggagggtataccaaatagaaataaaacgcaggaaacctctctgaatactgcccttggggacctcaggagggagtgggactgattggagacaaagagccagaaatcatcccctggagatactcagacactgtattgttattggcgctgtcctgtgagggcagtgtccaggctgccctgcttgtcatatccatgccctggctctggccccggtgagcacttgtgctgcatgaggaaaggaggatcaggtggggtcaaaaccaaagcatcgaggctggcactggccaagacagactctggcagggaggggagtggaaggaaggagccccaaacctggagtgagacctttgactttctgatgatgtggccaagaactaggagtcacctggccagcacagccaagagtggggctgggggcgccagctttaaggtgtcaacacctggcccttgcggggaaagagccttcagcagcccccacggcctggagcctgggtttattggagggtgctttcttaccctctgaacccagtggaggagggggcaatgggatattcctgctctgtatggcctctgggtcagctttttgttgcaaaatcctatcccccgctgctagattctttgaagcaagggagaagcaatagcccagcctcagaatgattctcaggaaagcaattccactgccagtggactgggtgccaggaggcctaggtctggatctggggctgccactaatgacaggaaagtgggcttatcctcaacctttctgagcctcagtgtcattatctgtaaaatggggatgataataccaggtagagttgctctgatgactggagaccatggagcggagtgtttgggaaatggcaaagatttgtgagggcttcgtgctttagagatttgctacccttaaccaccagcatcagctcacctgggaatctgtaagaaatgcagagtcctaggccccaccccagatctcctgattttaacaacattcccaggtgacttggatgcatgttaaagttggagaagctgccctaagtgacaaccctttgccttttcaggactttgcctctttccacagagctgcaggttctgtctaggctgcttttactgccatgggggctgcctggtccctgagtaagcagtgggtagccctggatggctgaggggctggggaagccagctgggccagaccaggaaggagcctgaggcacagcaccaaggcatggggtagggtgggctttgaggcacggcctccccatgcccagacccaggcccaaacaggaggctcctgtgcaccagcaagtgcagcaaagctggctgcagtgacaaggaagtcagagggagggctggtttgcctcaaccctcgccctggatgtggcaaaagataccacaccgaaggaagctgtaggggatctgggacttagtcaggctagctaagggcactgagtgattacagggcaaggccacagagcggcaggaagttgtaagtgcaggggccaggcacagtctgagtggagagccatgatggcactcatccctggctggctcctgggcccaggcctttgctcagaatacagtgcccaggcccgcctgggcattgccttaattcctgtctgaggctgccttccttcatcctcctcaagctgactgctatcagcaggagaagggaatgcagaaccacccccaccccaactccagtgtctccagaactgagcagggaccctccccatgacggagacagacaacccaatggcagggcctgggggagttctaacctcccgtgcccaagcctgacttcccttccctctccagatactgaggaaagtgggttggaggtgggccatgagggtgggggacagggggagggagagccatttcctaagaagagcccaggttgtctcagcccagggagactggtttcaggagctgttccttcagaaaggacgatggaaatggaagtcacagcagggctggggaactggggactggttaggttggacccatgggtgcagcaccctccaaactggtgtcagagcctgcagatgagtcccgggaggagcggccctgcaggaagcggatgatcttctcaatggtggcctcctggtattcgtgggaccacctgtgggcacaggagccaatgtggttcagacagctgggcagagggagctgctagtcagctgtttgcccacactctgcctgtcatggtgatttgtaccctacccccctggtcccagggccctggggctcacttgataccgttgaaagtaagcacagcctgcatgtcctcaggcaggacctggggctcaggccactcgaagccatcaatgatgggcacaatgttcttgccgcagcttaaagcagtcacaatctcctggagaaagaaaggaaaggaggaagatacccctgtacccatctagggacccttgtagccaggcaggtgctgggaggcccactggcccgaggctgggcccagggcaggacaccagtcctgatgtccaccttgatgtctaccttaacccttgtagtgtaataaaaaataaatatttttcctttgcccagagttcctggcacagagctgctaaaacccttggaatctcttgagtgatgagtgtctttgtatgctaaagagatgattccccactgggggcccggggggtgctatgggggtagcctagatagtttcaggaagagggctggtcaccagggagaccagggcatgactagaggattggaactttcagccccacctcccagcctccagagaggtgctggagattgagttcaatcaccaatggccaatgatttaatcaatcatgcctacataatggaacctccataaaaacccccaaacaaggggttttgaagagcctccaggttgataaacaggtgtaggtgctgggaaggtggtagaaggcatggcatccacacctccaccctccatacgtagagatcctatgtatctcttccatttggctattcttgagctgtgtcctttataactgtgaaattaaataattcagctgggcatggtgggtcacgcctgtaatcccaacactttgggaggctgaggcaggaggatcacttgagcccaggattttgagattaataatattatttattactattattcaagctttgttaaatcaaacctaaagctcttggaactttaagttattctgagccttgacaggaattggtctctgcagcctgagtcatggggcatgcagctgcaacttccacctattttttttttttctgtaattacttaggaagaccaaatggcaccagagataagactcccttagatccccacttagatcaccaccctttctcagggggtaataaagtcatcttccttggaatgtagcaatctataaccaatcaaagcactgtaacatacgcactggtcttgtatggaaaatgttgtaatcctgctaaaattcctctctctttgcctgtggaagtgaaaccttaacttctccagtttggaatgctcaccccatgcctttggagtcaatgcttactgggtggctattctcaaactttgcactcaaagaaactctatacttagtcttattttctgaatctcattatttaaggttgacataataaacaactaatagtaagtaaagtgaaaaaaaaaaaaaaaaaa

SEQ ID NO: 216 - protein, 459 aa, Homo sapiens
MEGSASPPEKPRARPAAAVLCRGPVEPLVFLANFALVLQGPLTTQYLWHRFSADLGYNGTRQRGGCSNRSADPTMQEVETLTSHWTLYMNVGGFLVGLFSSTLLGAWSDSVGRRPLLVLASLGLLLQALVSVFVVQLQLHVGYFVLGRILCALLGDFGGLLAASFASVADVSSSRSRTFRMALLEASIGVAGMLASLLGGHWLRAQGYANPFWLALALLIAMTLYAAFCFGETLKEPKSTRLFTFRHHRSIVQLYVAPAPEKSRKHLALYSLAIFVVITVHFGAQDILTLYELSTPLCWDSKLIGYGSAAQHLPYLTSLLALKLLQYCLADAWVAEIGLAFNILGMVVFAFATITPLMFTGYGLLFLSLVITPVIRAKLSKLVRETEQGALFSAVACVNSLAMLTASGIFNSLYPATLNFMKGFPFLLGAGLLLIPAVLIGMLEKADPHLEFQQFPQSP

SEQ ID NO: 217 - DNA, 2800 bp, Homo sapiens
aaagggtggacttgttgcagttgctgtaggattctaaatccaggtgattgtttcaaactgagcatcaacaacaaaaacatttgtatgatatctatatttcaatcatggaccaaaatcaacatttgaataaaacagcagaggcacaaccttcagagaataagaaaacaagatactgcaatggattgaagatgttcttggcagctctgtcactcagctttattgctaagacactaggtgcaattattatgaaaagttccatcattcatatagaacggagatttgagatatcctcttctcttgttggttttattgacggaagctttgaaattggaaatttgcttgtgattgtatttgtgagttactttggatccaaactacatagaccaaagttaattggaatcggttgtttcattatgggaattggaggtgttttgactgctttgccacatttcttcatgggatattacaggtattctaaagaaactaatatcaattcatcagaaaattcaacatcgaccttatccacttgtttaattaatcaaattttatcactcaatagagcatcacctgagatagtgggaaaaggttgtttaaaggaatctgggtcatacatgtggatatatgtgttcatgggtaatatgcttcgtggaataggggagactcccatagtaccattggggctttcttacattgatgatttcgctaaagaaggacattcttctttgtatttaggtatattgaatgcaatagcaatgattggtccaatcattggctttaccctgggatctctgttttctaaaatgtacgtggatattggatatgtagatctaagcactatcaggataactcctactgattctcgatgggttggagcttggtggcttaatttccttgtgtctggactattctccattatttcttccataccattctttttcttgccccaaactccaaataaaccacaaaaagaaagaaaagcttcactgtctttgcatgtgctggaaacaaatgatgaaaaggatcaaacagctaatttgaccaatcaaggaaaaaatattaccaaaaatgtgactggttttttccagtcttttaaaagcatccttactaatcccctgtatgttatgtttgtgcttttgacgttgttacaagtaagcagctatattggtgcttttacttatgtcttcaaatacgtagagcaacagtatggtcagccttcatctaaggctaacatcttattgggagtcataaccatacctatttttgcaagtggaatgtttttaggaggatatatcattaaaaaattcaaactgaacaccgttggaattgccaaattctcatgttttactgctgtgatgtcattgtccttttacctattatattttttcatactctgtgaaaacaaatcagttgccggactaaccatgacctatgatggaaataatccagtgacatctcatagagatgtaccactttcttattgcaactcagactgcaattgtgatgaaagtcaatgggaaccagtctgtggaaacaatggaataacttacatctcaccctgtctagcaggttgcaaatcttcaagtggcaataaaaagcctatagtgttttacaactgcagttgtttggaagtaactggtctccagaacagaaattactcagcccatttgggtgaatgcccaagagatgatgcttgtacaaggaaattttacttttttgttgcaatacaagtcttgaatttatttttctctgcacttggaggcacctcacatgtcatgctgattgttaaaattgttcaacctgaattgaaatcacttgcactgggtttccactcaatggttatacgagcactaggaggaattctagctccaatatattttggggctctgattgatacaacgtgtataaagtggtccaccaacaactgtggcacacgtgggtcatgtaggacatataattccacatcattttcaagggtctacttgggcttgtcttcaatgttaagagtctcatcacttgttttatatattatattaatttatgccatgaagaaaaaatatcaagagaaagatatcaatgcatcagaaaatggaagtgtcatggatgaagcaaacttagaatccttaaataaaaataaacattttgtcccttctgctggggcagatagtgaaacacattgttaaggggagaaaaaaagccacttctgcttctgtgtttccaaacagcattgcattgattcagtaagatgttatttttgaggagttcctggtcctttcactaagaatttccacatcttttatggtggaagtataaataagcctatgaacttataataaaacaaactgtaggtagaaaaaatgagagtactcattgttacattatagctacatatttgtggttaaggttagactatatgatccatacaaattaaagtgagagacatggttactgtgtaataaaagaaaaaatacttgttcaggtaattctaattcttaataaaacaaatgagtatcatacaggtagaggttaaaaaggaggagctagattcatatcctaagtaaagagaaatgcctagtgtctattttattaaacaaacaaacacagagtttgaactataatactaaggcctgaagtctagcttggatatatgctacaataatatctgttactcacataaaattatatatttcacagactttatcaatgtataattaacaattatcttgtttaagtaaatttagaatacatttaagtattgtggaagaaataaagacattccaatatttgcaaaaaaaaaaaaaaa

SEQ ID NO: 218 - protein, 691 aa, Homo sapiens
MDQNQHLNKTAEAQPSENKKTRYCNGLKMFLAALSLSFIAKTLGAIIMKSSIIHIERRFEISSSLVGFIDGSFEIGNLLVIVFVSYFGSKLHRPKLIGIGCFIMGIGGVLTALPHFFMGYYRYSKETNINSSENSTSTLSTCLINQILSLNRASPEIVGKGCLKESGSYMWIYVFMGNMLRGIGETPIVPLGLSYIDDFAKEGHSSLYLGILNAIAMIGPIIGFTLGSLFSKMYVDIGYVDLSTIRITPTDSRWVGAWWLNFLVSGLFSIISSIPFFFLPQTPNKPQKERKASLSLHVLETNDEKDQTANLTNQGKNITKNVTGFFQSFKSILTNPLYVMFVLLTLLQVSSYIGAFTYVFKYVEQQYGQPSSKANILLGVITIPIFASGMFLGGYIIKKFKLNTVGIAKFSCFTAVMSLSFYLLYFFILCENKSVAGLTMTYDGNNPVTSHRDVPLSYCNSDCNCDESQWEPVCGNNGITYISPCLAGCKSSSGNKKPIVFYNCSCLEVTGLQNRNYSAHLGECPRDDACTRKFYFFVAIQVLNLFFSALGGTSHVMLIVKIVQPELKSLALGFHSMVIRALGGILAPIYFGALIDTTCIKWSTNNCGTRGSCRTYNSTSFSRVYLGLSSMLRVSSLVLYIILIYAMKKKYQEKDINASENGSVMDEANLESLNKNKHFVPSAGADSETHC

SEQ ID NO: 219 - DNA, 3735 bp, Homo sapiens
ccaggctccttctctataaagtgggatctatcatgaccagcctaccttatcaatataggagagaaaatcttcatgcctgaagatatacccctgctccctggctccccacgccggctgagccctcaggcagggtccagagggggccagggccccaaacatggacagcagtgtctcaagatgccaggtccccgggccccaggtctgcagggcggttccaacagagatcctggccagccctgcggtggagagagcacccgcagcagctctgtcatcaacaactatctggatgccaatgagcctgtgtccttggaggcccgtcttagccgcatgcacttccatgacagtcagaggaaggtcgactatgtacttgcctaccactaccggaaacgcggggtgcacctggcccaaggcttccctggccactcgctggctatcgtctccaatggggagacaggcaaggagcctcatgctgggggcccaggtgacattgagctgggaccgctcgatgccctggaggaggagaggaaggagcagcgggaggaatttgagcacaatctgatggaggctggactggagcttgagaaggacttggagaataaaagccagggatccatctttgtccggatacacgccccgtggcaggtgctggccagagaggcagaattcttgaagatcaaagttcctaccaagaaaatgtacgagatcaaagcaggaggcagcattgcaaagaagttcagcgcggctctgcagaagctgagctcgcacctgcagccccgagttccagaacacagcaacaacaagatgaaaaacctctcctacccattctccagggagaagatgtacctgtacaacatccaggaaaaggacaccttctttgataatgccacccgcagccgcattgtgcacgagatcctgaagcgcacagcctgctcccgagccaacaacacgatgggtattaactctctgatcgcaaacaatatctatgaggctgcctaccctcttcatgacggtgaatacgatagtccagaggacgatatgaatgacaggaagctgctatatcaagaatgggcgcgctatggagtgttctataagttccaacctattgacctcatcagaaagtattttggagaaaaaattggactgtattttgcctggctgggattatatacatcattcctcatcccatcttctgtaattggagtgattgtgtttctttatggatgtgcaacaattgaagaagatattcccagcagagagatgtgtgaccagcagaatgccttcaccatgtgtcccctgtgtgacaagtcctgtgattactggaacctcagctcagcctgtgggaccgcgcaggccagccacctgtttgacaaccctgccaccgtcttcttctctatcttcatggctctgtgggctaccatgttcctggaaaactggaagaggctacagatgcgactgggctacttttgggacctgactggcatagaagaggaagaagaacgtgcccaggaacattccaggcctgagtatgaaaccaaagttcgagagaaaatgctaaaggagagcaaccagtctgctgtccagaaattggaaacaaacacgacggagtgtggcgatgaggatgatgaagataaactgacctggaaggatcgtttcccaggttacctgatgaactttgcctccatcttattcatgattgccctgacattctcaatcgtctttggggtgatagtgtatcgaataacaactgcagccgctctgtctctcaataaggctacacgctccaatgtccgggtgacagtgacagcaacagcagtcatcatcaacctcgtggtcatcctcatcctggacgagatctacggcgctgtggccaagtggctcaccaaaattgaggttccgaaaacagaacagacttttgaagagcgcctgatcctcaaagctttcttgctcaagtttgtcaatgcctactcccccatcttctatgtggcctttttcaaagggaggtttgtgggcaggcctggaagctacgtctatgtattcgatggttaccgcatggaagagtgtgctccagggggctgtctcatggagctctgcattcagctcagcatcatcatgttggggaagcagttgatccagaacaacatctttgagattggagtcccgaagctaaagaaactatttcgaaagctgaaagatgagaccgaagctggagaaactgactctgcccattcgaaacatccagagcagtgggacctagactacagcttggaaccatacacaggactgactccggagtacatggaaatgatcatccagtttggttttgtcaccctcttcgtggcctcctttcccctggcacctgtgtttgccctcctcaacaacgtcattgaagtgcggctcgatgcaaagaagtttgttacagagctgagacggccggatgctgtaagaaccaaagatatcggaatctggtttgacattctctctggaattggcaagttctctgttatcagcaacgcttttgtcattgcgatcacctccgactttatcccccgcctggtgtaccagtactcctacagtcacaatgggactctgcacggctttgtcaaccacaccctctcctttttcaacgtcagccagctgaaggaggggacgcagccagaaaactcacagtttgaccaggaggttcagttctgcaggtttaaggattaccgagagccgccatgggccccgaacccttatgagttttcgaaacagtactggtttattctgtccgcccgtctggcttttgtcataatcttccagaacctcgtgatgttcctgagcgtcctcgtggactggatgattccagacatccccacggacatcagcgaccagatcaagaaagagaagagcttattagtggatttcttcctgaaagaggagcatgagaagctcaagctgatggatgagccggctctgaggagcccaggaggtggggatcgaagcaggagccgggcagccagctcagcaccttcaggccaaagccagctgggcagcatgatgtcgtcaggctctcagcacaccaatgtgtgagcagttcagcctgcagcagaggagggcacggcagcagagacacgcacatgcacgtaagcatgttcctacacccacatggcgtgctgtctgtctgcaggggcctggcttgatggggtcttgaagagggggcagtgtgtaaaaagaaagagcctgacagaatgagtgtaggaaggaagagaaatgatgctacatctcagaaacttcaagcttaagtttcttttaggtccccttttaagctgcatccttttgagggattggaaccccactggggtctctccaccccagagtctcaggcaccgcgagcattcccatgtaccctggggcaccctcttgtacttcaccatcatttctgactttgaccagctgtaagagaaatgcagtcaggagcacagcatcccctacttactatcactacaagaaaactgagtcacttgcagtggggctgccacagtctcagcagatgcaaattaagttacaaggctgaatggtgcagccgctggacctgatagtaaggtgcaaaggtccaaacctgggcttgtctccacttcacgtcacaaaaacgtttggagctaaatgcagataaccatcattttatgaaagttcagatttaaaataataaaataaatggacacattctttataaagatgaaaaaaaaaaaaaaaaaa

SEQ ID NO: 220 - protein, 1003 aa, Homo sapiens
MATPGPRDIPLLPGSPRRLSPQAGSRGGQGPKHGQQCLKMPGPRAPGLQGGSNRDPGQPCGGESTRSSSVINNYLDANEPVSLEARLSRMHFHDSQRKVDYVLAYHYRKRGVHLAQGFPGHSLAIVSNGETGKEPHAGGPGDIELGPLDALEEERKEQREEFEHNLMEAGLELEKDLENKSQGSIFVRIHAPWQVLAREAEFLKIKVPTKKEMYEIKAGGSIAKKFSAALQKLSSHLQPRVPEHSNNKMKNLSYPFSREKMYLYNIQEKDTFFDNATRSRIVHEILKRTACSRANNTMGINSLIANNIYEAAYPLHDGEYDSPEDDMNDRKLLYQEWARYGVFYKFQPIDLIRKYFGEKIGLYFAWLGLYTSFLIPSSVIGVIVFLYGCATIEEDIPSREMCDQQNAFTMCPLCDKSCDYWNLSSACGTAQASHLFDNPATVFFSIFMALWATMFLENWKRLQMRLGYFWDLTGIEEEEERAQEHSRPEYETKVREKMLKESNQSAVQKLETNTTECGDEDDEDKLTWKDRFPGYLMNFASILFMIALTFSIVFGVIVYRITTAAALSLNKATRSNVRVTVTATAVIINLVVILILDEIYGAVAKWLTKIEVPKTEQTFEERLILKAFLLKFVNAYSPIFYVAFFKGRFVGRPGSYVYVFDGYRMEECAPGGCLMELCIQLSIIMLGKQLIQNNIFEIGVPKLKKLFRKLKDETEAGETDSAHSKHPEQWDLDYSLEPYTGLTPEYMEMIIQFGFVTLFVASFPLAPVFALLNNVIEVRLDAKKFVTELRRPDAVRTKDIGIWFDILSGIGKFSVISNAFVIAITSDFIPRLVYQYSYSHNGTLHGFVNHTLSFFNVSQLKEGTQPENSQFDQEVQFCRFKDYREPPWAPNPYEFSKQYWFILSARLAFVIIFQNLVMFLSVLVDWMIPDIPTDISDQIKKEKSLLVDFFLKEEHEKLKLMDEPALRSPGGGDRSRSRAASSAPSGQSQLGSMMSSGSQHTNV

SEQ ID NO: 221 - DNA, 8097 bp, Homo sapiens
atttcctataaatatcacaaatatttccaacaaaagagcatagatgtcttttatacaattcttttgagaatgattctgcagatttctgcattttctcctcattaatttgacctgggatggttttcactgaggaaaaaaatctttaagcaaacatgttaaatgtttacctatataaaaattattacttcaggtgactccgataatataacgcatgtgtggaatgaggatgatggacagaccttatctccaagcagtctggctgcacagctcctaattctggaaaactttgaagatgccctcttaaatatatcagcaaatagtccttatattccttacttggcatgtgtgagaaatgtgactgacagtttggccagaggttcaccagaaaatctaagactcctgcagtccacaatacgatttaaaaaatcttttcttcgcaatggttcctatgaagattactttcctccagttcctgaagtcctaaaatcaaaactgtctcaacttcgaaacttgaccgaacttctttgtgaatctgaaactttcagtttgatagagaagtcatgccagctctctgatatgagctttgggagcctgtgtgaagaaagtgagtttgatctgcaactcctcgaagcggcagagctgggcaccgaaatagcagccagcttactgtaccatgacaatgtcatatctaaaaaagtgagagatttgctgactggagatccaagcaaaattaatttaaatatggatcagtttctagaacaggcactgcaaatgaattacttggaaaatatcactcagttaataccgatcatagaagccatgctgcatgtcaataacagtgcagatgcttctgaaaagccaggtcagttactagaaatgtttaaaaatgttgaagagctgaaagaagatttaaggagaacaacaggaatgtccaacaggactattgacaagttgctggccattcccatccctgataatagagctgagattatttctcaggtgttctggctgcattcctgtgatactaatatcaccactcccaaactagaagatgcaatgaaagaattctgcaacctgtctctttcagagagatcccggcagtcttacctcatcggactcacccttctgcactacttaaacatttacaacttcacatacaaggtgtttttcccgaggaaagatcaaaagccagtagaaaagatgatggagctcttcataagactaaaagagattctcaatcagatggcttctggcacacatccgctgctagacaaaatgagatccctgaagcaaatgcatctgcccagaagtgttccattaacacaggcaatgtacagaagcaaccgaatgaacacaccacaaggatcatttagcaccatctcccaagcattatgttctcaaggaattaccactgaatatttaactgccatgctgccctcttcccagaggccaaaaggcaaccacaccaaggattttttgacttataaattaactaaagagcaaattgcttcaaaatatggaattcccataaattccacaccattttgcttctccctttataaagacatcattaacatgcccgctggacctgtgatttgggctttcttgaaacctatgttgttgggaagaattttgtatgcaccatataacccagtcacaaaggcaataatggaaaagtccaatgtaactctgagacagctggcggaattaagagaaaaatctcaagagtggatggataagtcgccacttttcatgaattccttccatctgttaaaccaggcaattccaatgctccagaatactctaaggaacccttttgtgcaagtttttgtaaagttctccgtgggactcgatgctgttgaactattgaaacagatagatgaactcgatattctaagactgaaattagagaacaacattgacatcatcgatcagcttaacacactatcttccctgacagtaaatatttcctcttgtgtattatatgaccgtattcaggcagcaaaaaccatagatgaaatggagagagaggctaaaaggctctacaaaagcaacgaactctttggaagtgttatttttaagcttccttctaacagaagctggcacagaggctatgactctggaaatgtctttcttcctcctgtcataaaatataccatccggatgagtctcaagaccgcacagaccacaagaagcctaagaaccaagatttgggctccagggccacacaattctccatcacacaaccagatctatggcagggcttttatttatttacaggatagtattgaaagagcaatcattgaattgcaaactggaaggaactcccaggaaatagcagtccaggttcaagcaattccttatccctgcttcatgaaagacaacttcctaaccagtgtctcttattctcttccaattgtgcttatggttgcctgggttgtatttatagctgcctttgtaaaaaagcttgtctatgagaaagacctccggcttcatgagtacatgaagatgatgggtgtgaactcctgcagccatttctttgcctggcttatagagagtgttggatttttactggttaccatcgtgatcctcatcattatactcaagtttggcaatattcttcctaaaacaaatgggttcattttgttcctgtatttttcggactacagcttctcggttattgccatgagctatcttatcagtgtcttcttcaacaacaccaacattgcagctctgatcggaagcctcatctacatcattgccttctttccatttattgttctggttacagtggagaatgagttgagctatgtattgaaagtgttcatgagcctgctgtccccaacagcattcagctatgcaagccaatacattgcacgatacgaagaacagggcattggtcttcagtgggaaaatatgtacacctccccggttcaggatgacaccacctcatttggctggctgtgctgtctaatcctagctgactctttcatttatttccttattgcttggtatgtcaggaatgtcttcccagggacatacggtatggcagctccctggtattttccaattcttccttcctattggaaggagcgatttgggtgtgcagaggtgaagcctgagaagagcaatggcctcatgtttactaacatcatgatgcagaacaccaacccatctgccagtcctgaatacatgttttcctctaacatcgagcctgaacctaaagatctcacagtcggggttgccctgcatggggtcacaaagatctatggctcaaaagttgctgttgataacctcaatctgaacttttatgaagggcatattacttcattgctggggcccaatggagctgggaaaactactaccatttccatgttaactgggctgtttggggcctcagcaggcaccatttttgtatatggaaaagatatcaaaacagacctacacacggtacggaagaacatgggagtctgtatgcagcacgacgtcttgttcagttacctcactactaaggagcaccttctcctatatggttccatcaaagttcctcactggactaaaaagcagctccacgaggaagtaaaaaggactttaaaagatactggactatatagccatcgtcataagagagttggaacactgtcaggaggcatgaagaggaagttatctatatccatagctctcattggtggatcaagggtagtaattttggatgaaccatctactggagttgacccatgttctcgccgaagtatatgggatgttatatccaagaacaaaactgccagaacaatcattctgtcaacgcaccacttggacgaggctgaagtgctgagtgaccgcatcgccttcctggagcagggtgggcttaggtgctgtgggtccccattttacctcaaggaagcctttggcgatgggtatcacctcacgcttaccaagaagaagagtccaaatttaaatgcaaatgcagtatgtgacaccatggccgtgacagcaatgatccaatcacatctccccgaagcctacctcaaggaggatattgggggagagcttgtttatgtacttcctccattcagcaccaaagtctcaggggcctacctgtcactcctacgggcactcgacaatggcatgggtgacctcaacatcgggtgctacggcatttcagataccaccgtggaggaggtctttctgaacttgaccaaagagtcacaaaaaaatagtgctatgagtcttgagcacttaacacaaaagaaaattgggaattccaatgccaatggcatctcaactcctgacgatttatctgtgagcagcagcaatttcacagacagagatgacaaaatcctgacaagaggagagaggctggatggctttggactgttgctgaagaagatcatggctatactcatcaagaggttccaccacacccgcaggaactggaaaggtctcattgctcaggttatcctccccatcgtctttgttaccactgccatgggccttggcacactgagaaattccagcaacagttatccagagattcagatctccccctctctttatggtacctccgaacagacagccttctatgctaattatcacccgagcacggaagcacttgtctcagcaatgtgggacttccctggaattgacaacatgtgtctgaacaccagtgatctacagtgtttaaacaaagacagtctggaaaaatggaacaccagtggagaacccatcactaattttggtgtttgctcctgctcagaaaatgtccaggaatgtcctaaatttaactattccccaccgcacagaagaacttactcatcccaggtaatttataacctcactgggcaacgagtggaaaattatcttatatcaactgcaaatgagtttgtccaaaaaagatatggaggttggagttttgggctgcctttgacaaaagaccttcgttttgatataacaggagtccctgccaatagaacacttgccaaggtatggtatgatccagaaggctatcactcccttccagcttacctcaacagcctgaataatttccttctgcgagttaacatgtcaaaatacgatgctgcccgacatggcatcatcatgtatagccatccttatccaggagtgcaagaccaagaacaagccacaatcagcagtttaatcgatattttagtggcactgtctatcttgatgggctactctgtcaccaccgccagctttgtcacctatgttgtaagggaacatcaaaccaaagccaaacagttgcagcacatttcaggcattggcgtgacatgctactgggtaacaaacttcatttatgacatggttttctacttggtgcctgtagcgttttcaattggtatcattgcgattttcaaattacctgcattctacagtgaaaacaacctaggcgctgtatctctcctacttctcctgtttgggtatgcaacattttcctggatgtacttgctggctgggctcttccatgaaacaggaatggccttcatcacttacgtctgtgtcaacttgttttttggcattaattccattgtttccctgtcagtggtatactttctttccaaggaaaagcctaatgatccgactttagaacttatttctgaaaccctcaagcgcattttcctgattttcccacaattctgttttggctacggtttgattgaactttctcaacaacagtcggtcctagacttcttaaaagcatatggagtggaatacccaaatgaaacctttgagatgaataaactaggtgcaatgtttgtggctttggtttctcagggcaccatgtttttttccttgcgactcttaatcaacgaatccctgataaagaaactcaggcttttcttcagaaaatttaattcttcacatgtaagggagacaatagatgaggatgaagatgtgcgggctgagagattaagagttgagagtggtgcagctgaatttgacttggtccaactttattgtctcacaaagacctaccaacttatccacaaaaagattatagctgtaaacaacatcagcattgggatacctgctggagagtgttttgggcttcttggagtgaatggagcaggaaagaccactatattcaagatgctgacaggagacatcattccttcaagtggaaacattctgatcagaaataagaccggatctctgggtcacgttgattctcacagctcattagttggctactgtcctcaggaagatgccttagatgacctggtaactgtggaagaacatttgtatttctatgccagggtacatggaattccagaaaaggatattaaagaaactgttcataaactccttaggagacttcacctgatgcccttcaaggacagagctacctctatgtgcagttatggcacaaaaagaaaattatccactgcactggccttgatagggaaaccttccattctactgctggatgagccgagctctggcatggatccgaagtcgaaacggcacctctggaagatcatttcagaagaagtacagaacaaatgttccgtcatcctcacatctcacagcatggaagaatgtgaagctctctgtaccaggttggccattatggtgaatggaaagtttcaatgtattggatctttgcagcacataaagagcaggtttggacgaggatttactgtcaaagttcacttgaagaataacaaagtgaccatggagaccctcacaaagttcatgcagctgcactttccaaaaacatacttaaaagatcagcacctcagcatgctagagtatcatgtaccagtcacagcaggaggagtcgcaaacatttttgatctgctggaaaccaacaagactgctttaaatattacaaatttcttagtgagtcagaccactctggaagaggttttcatcaactttgccaaagaccagaagtcctatgaaactgctgataccagcagccaaggttccactataagtgttgactcacaagatgaccagatggagtcttaacacttccagcaaactcaatctcagcgtgtgaccaatggcttcattttgaagaaaagccacagaagatacacttccgcaagatatcttcattttaaagtaaagtaatatactgtatggaaagttacaactgtgttagactaacaagtaattataaaaggaaatttttccttctaaggtcagtgagtgttgttgctactgaaatgaattcctgtatactcaacactgtgagcatgctaatgtatatgctggtgattcttatgcaaaggtgaagccacctcaagatgaatatcttaatttattactttcaataaaaagacagtttaaaaggcatggattttggtagttgaaatataagagtggagaagaaaagtcagatggtttgtggcaggtgccaccgggcaagcagacaacataatttatttccagaaaacaacagaatgaacatcatcatgaatacatgaatcggctgtgatgtgtgaactgctaagggccaaatgaacgtttgcagagcagtgggcacaatgtttacaatgtatgtgtatgtcactttcggtacctgtgaatgcatggggacgtgctgaacccgaaaaaaagtgcctttccataaggactgcaatagagagggcaatttaccctggtggtacacggaacctagattcactcctgccatgccttgccaatagtaagctgcagggtggaacaagaaatcacttgctctggggggaagggaggggggaatgggtgtgtcagctgggtagatacaaaccctgaaaagagaatccatgtgctactggcaggcaacattttttaaagctctttcagaaaccctcatatttggggtttcttttcaggaaacattcctgtggagggaaaacgaatatgaagataattttcagctaattatctgggtgacccagaatcgtgtatatggctataggatagacttcttaataatggcaagtgacgtggccctggggaaaggtgctttatgtaccgtgtgtgcgtgtatgtgtgtgtatctatacaagtttgtcagctttggcatgactgtttgtctcgaaaaccaataaactcaaagtttagaaaaactcaaaaaaaaaaaaa

SEQ ID NO: 222 - protein, 2595 aa, Homo sapiens
MASLFHQLQILVWKNWLGVKRQPLWTLVLILWPVIIFIILAITRTKFPPTAKPTCYLAPRNLPSTGFFPFLQTLLCDTDSKCKDTPYGPQDLLRRKGIDDALFKDSEILRKSSNLDKDSSLSFQSTQVPERRHASLATVFPSPSSDLEIPGTYTFNGSQVLARILGLEKLLKQNSTSEDIRRELCDSYSGYIVDDAFSWTFLGRNVFNKFCLSNMTLLESSLQELNKQFSQLSSDPNNQKIVFQEIVRMLSFFSQVQEQKAVWQLLSSFPNVFQNDTSLSNLFDVLRKANSVLLVVQKVYPRFATNEGFRTLQKSVKHLLYTLDSPAQGDSDNITHVWNEDDGQTLSPSSLAAQLLILENFEDALLNISANSPYIPYLACVRNVTDSLARGSPENLRLLQSTIRFKKSFLRNGSYEDYFPPVPEVLKSKLSQLRNLTELLCESETFSLIEKSCQLSDMSFGSLCEESEFDLQLLEAAELGTEIAASLLYHDNVISKKVRDLLTGDPSKINLNMDQFLEQALQMNYLENITQLIPIIEAMLHVNNSADASEKPGQLLEMFKNVEELKEDLRRTTGMSNRTIDKLLAIPIPDNRAEIISQVFWLHSCDTNITTPKLEDAMKEFCNLSLSERSRQSYLIGLTLLHYLNIYNFTYKVFFPRKDQKPVEKMMELFIRLKEILNQMASGTHPLLDKMRSLKQMHLPRSVPLTQAMYRSNRMNTPQGSFSTISQALCSQGITTEYLTAMLPSSQRPKGNHTKDFLTYKLTKEQIASKYGIPINSTPFCFSLYKDIINMPAGPVIWAFLKPMLLGRILYAPYNPVTKAIMEKSNVTLRQLAELREKSQEWMDKSPLFMNSFHLLNQAIPMLQNTLRNPFVQVFVKFSVGLDAVELLKQIDELDILRLKLENNIDIIDQLNTLSSLTVNISSCVLYDRIQAAKTIDEMEREAKRLYKSNELFGSVIFKLPSNRSWHRGYDSGNVFLPPVIKYTIRMSLKTAQTTRSLRTKIWAPGPHNSPSHNQIYGRAFIYLQDSIERAIIELQTGRNSQEIAVQVQAIPYPCFMKDNFLTSVSYSLPIVLMVAWVVFIAAFVKKLVYEKDLRLHEYMKMMGVNSCSHFFAWLIESVGFLLVTIVILIIILKFGNILPKTNGFILFLYFSDYSFSVIAMSYLISVFFNNTNIAALIGSLIYIIAFFPFIVLVTVENELSYVLKVFMSLLSPTAFSYASQYIARYEEQGIGLQWENMYTSPVQDDTTSFGWLCCLILADSFIYFLIAWYVRNVFPGTYGMAAPWYFPILPSYWKERFGCAEVKPEKSNGLMFTNIMMQNTNPSASPEYMFSSNIEPEPKDLTVGVALHGVTKIYGSKVAVDNLNLNFYEGHITSLLGPNGAGKTTTISMLTGLFGASAGTIFVYGKDIKTDLHTVRKNMGVCMQHDVLFSYLTTKEHLLLYGSIKVPHWTKKQLHEEVKRTLKDTGLYSHRHKRVGTLSGGMKRKLSISIALIGGSRVVILDEPSTGVDPCSRRSIWDVISKNKTARTIILSTHHLDEAEVLSDRIAFLEQGGLRCCGSPFYLKEAFGDGYHLTLTKKKSPNLNANAVCDTMAVTAMIQSHLPEAYLKEDIGGELVYVLPPFSTKVSGAYLSLLRALDNGMGDLNIGCYGISDTTVEEVFLNLTKESQKNSAMSLEHLTQKKIGNSNANGISTPDDLSVSSSNFTDRDDKILTRGERLDGFGLLLKKIMAILIKRFHHTRRNWKGLIAQVILPIVFVTTAMGLGTLRNSSNSYPEIQISPSLYGTSEQTAFYANYHPSTEALVSAMWDFPGIDNMCLNTSDLQCLNKDSLEKWNTSGEPITNFGVCSCSENVQECPKFNYSPPHRRTYSSQVIYNLTGQRVENYLISTANEFVQKRYGGWSFGLPLTKDLRFDITGVPANRTLAKVWYDPEGYHSLPAYLNSLNNFLLRVNMSKYDAARHGIIMYSHPYPGVQDQEQATISSLIDILVALSILMGYSVTTASFVTYVVREHQTKAKQLQHISGIGVTCYWVTNFIYDMVFYLVPVAFSIGIIAIFKLPAFYSENNLGAVSLLLLLFGYATFSWMYLLAGLFHETGMAFITYVCVNLFFGINSIVSLSVVYFLSKEKPNDPTLELISETLKRIFLIFPQFCFGYGLIELSQQQSVLDFLKAYGVEYPNETFEMNKLGAMFVALVSQGTMFFSLRLLINESLIKKLRLFFRKFNSSHVRETIDEDEDVRAERLRVESGAAEFDLVQLYCLTKTYQLIHKKIIAVNNISIGIPAGECFGLLGVNGAGKTTIFKMLTGDIIPSSGNILIRNKTGSLGHVDSHSSLVGYCPQEDALDDLVTVEEHLYFYARVHGIPEKDIKETVHKLLRRLHLMPFKDRATSMCSYGTKRKLSTALALIGKPSILLLDEPSSGMDPKSKRHLWKIISEEVQNKCSVILTSHSMEECEALCTRLAIMVNGKFQCIGSLQHIKSRFGRGFTVKVHLKNNKVTMETLTKFMQLHFPKTYLKDQHLSMLEYHVPVTAGGVANIFDLLETNKTALNITNFLVSQTTLEEVFINFAKDQKSYETADTSSQGSTISVDSQDDQMES

SEQ ID NO: 223 - DNA, 6651 bp, Homo sapiens
ataacacccggccccgccgggcggccgcgggtgggtagagaacatggacttcccgtgcctctggctagggctgttgctgcctttggtagctgcgctggatttcaactaccaccgccaggaagggatggaagcgtttttgaagactgttgcccaaaactacagttctgtcactcacttacacagtattgggaaatctgtgaaaggtagaaacctgtgggttcttgttgtggggcggtttccaaaggaacacagaattgggattccagagttcaaatacgtggcaaatatgcatggagatgagactgttgggcgggagctgctgctccatctgattgactatctcgtaaccagtgatggcaaagaccctgaaatcacaaatctgatcaatagtacccggatacacatcatgccttccatgaacccagatggatttgaagccgtcaaaaagcctgactgttattacagcatcggaagggaaaattataaccagtatgacttgaatcgaaatttccccgatgcttttgaatataataatgtctcaaggcagcctgaaactgtggcagtcatgaagtggctgaaaacagagacgtttgtcctctctgcaaacctccatggtggtgccctcgtggccagttacccatttgataatggtgttcaagcaactggggcattatactcccgaagcttaacgcctgatgatgatgtttttcaatatcttgcacatacctatgcttcaagaaatcccaacatgaagaaaggagacgagtgtaaaaacaaaatgaactttcctaatggtgttacaaatggatactcttggtatccactccaaggtggaatgcaagattacaactacatctgggcccagtgttttgaaattacgttggagctgtcatgctgtaaatatcctcgtgaggagaagcttccatccttttggaataataacaaagcctcattaattgaatatataaagcaggtgcacctaggtgtaaagggtcaagtttttgatcagaatggaaatccattacccaatgtaattgtggaagtccaagacagaaaacatatctgcccctatagaaccaacaaatatggagagtattatctccttctcttgcctgggtcttatataataaatgttacagtccctggacatgatccacacatcacaaaggtgattattccggagaaatcccagaacttcagtgctcttaaaaaggatattctacttccattccaagggcaattggattctatcccagtatcaaatccttcatgcccaatgattcctctatacagaaatttgccagaccactcagctgcaacaaagcctagtttgttcttatttttagtgagtcttttgcacatattcttcaaataaagtaaaatgtgaaactcaacccacatcaccacctggaatcagggattgctcactccaggttactgcaaccctaactcactctagtgggaccttgactggagaaactccacgatcttcctgaagaagagaaatggatgtttccaaattccacaataagcaatatgtggtgataatgaaaagaatgattcagtcttgacggtgaatggaagacacttacctaacaagtactgctcatttacactcaaattaatcttgaagtagtcttaaaatgtgtaagaagttaaaacttgagaagcaaaaaaatgcctgcaaaaagaagatcattttgtatacagagaaccggatgaatataagcaatgaagatgaacatttattgatcttctacatacaagacttcaccataaggccaggagcagtggctcacaccttgtaatcccagcactttgggaggccaaggtgggcggatcaccctgaggtcaggagttcaaaaccagcctgaccaacatggtgaaaccctgtctctactaaatattagcggggtgtggtggcgggcacctgtaatcgcagcctttcaggaggctgagacaggagaatcgcttgaaccctagaggcggagtttgcagtgagccgagatagtgccattgtactccagcttgggcaacagagtaagactctgtctcaaaaaaaaaaaaacaaaaacaaacaaacaaaaaaaacacctcaccatgagtgctacatgtgaatagatattaagtgccatatataattagttctcagaagaagggagaaatgatcataggactgggaattgttttgcaaacgttctaggagatgtgagagaaaatatgtaaccacatcttagtggcccaagaaaatacaggcctgaagggataagattgtgtctctatagagcttcaaagcatacaggtcaattaagaaagcccctctctctccagagccgtttccctagcttttggcacctggatgccacagtcctccattaggctgatgactccaaagatgtaactctagcctcttgcctgagcttcagactcgcgtcccactgcccacaggacacatccacctggatgtgactcacaggtacctccaacccatcatgtggagatactcatcctgttccccctagagctgctcttcctgctgcattctctctctcaattactgggaccaccaagctaggaacctgggagtcatccttgatactttctcttcctccttaatcctgtgtattcagcaagtaactaaaggttggtgttggccaggcatggtggctcatgcctgtaatcccagcattttgggaggccaaggcgggcggatcacttgaggtcaggagctcaagaccagcctggccaacatggtgaaaccccatctctactaaaaaaaaaaaaaaaattagtcgggcgtggtggtgcatgcctgtaatcccagctactggggaggctgaggcaggagaatcgcttgaacctgggaggcagaggttgcagtgagccgggattgcgccattgtactccagcctgggtgaagaagtgagactctgtcttaaaaaaaaaaattggtgctgataaatattgatgaattctgctctctgctctctatggttgtcaacactgcagagttgaggcctcatatctcacctgcactgctgcaacagcttactggtcccttgctcccagccttctcctcttcagtccatcgtccacacagcactggggaaggggagccacttgaaacaaaagtcaacaactggttgtagttcataaacacagagctgtttgtgtcccctgtatctggaatgccattatgacccactacattttttctttcctacccctcttaaaactcagttcaggtagcagctccactaggaagccttggctgaccataatcccattcaattccatttcacctcttcgcaggcagtctggggttagggaccctttctctttgctccccaaaataaactggttatctctactattggatttacaacattgtattataatcttctccatgtgtgccttctctagtagaatgtgagctctttgaggccaaggtctatttaatttgtttgaaaaattcattgttatatcctcaaagcctagcacatagtaggtactgaatgaatgaatgaacaaggggtgccaggagactgctactcccagtccttcccagaaactgcctagggctttgagtcattttatgaagctaggtcttaatgcgtaggcaacctcccagctcactatgaacgctgacagaagagtgttttcatgtctataatcaagaattccagatacattccttttactgaaccttgaattgatcctaagattggtagtaaaggtattatgttacctcctaacagcactacaaagtacctttttttatcagaaaaaaattttaccattaggactcaatttgaagtactaatgcttctcaagttctccactatgagagttaccctgtattagaccgttacctataagaattaaggggtaaagcactaaacagaaaagaaaaaaaaaatagcaactctggtgagcagatttctttcctttcttccttccttctcctcttcctaccttcctccctcctttccctctcctccccttctctccctttccctccccttcccttccttttcttctttcctccgctcccctccccttccctccccttcccatccttctttctcttttttttacttaatccccagtgtgacagtaatataggctgatttctagaagtgtggtgtattactcatggaaagtgagttgccttggttattactttcaattgaaagttctatgggatctagaaatgagacatactggcatggagagtgagaacgacaaaggaatgaagagctacaggagcatttaggccatttctatgccaagcttattctacatgcacaaaatcatacatgttaataaatataaacaaattggaggcttatttaaaccaattatgaaatctggtaatttgtgcagcagcaatagatgataaccaaaaaaaactcataataatctgaatatcttgatcatttgtatttaaagaagcagtaattatatacttgaaagtacataatatagtattgcaaaaatgactttggtatattacaaattaaaagtatataagatgaaacttgatttgctatcaagccccaagcaatttttcaactgggcattgaattctaacttttctaagatagcaatttttgaagagacacgaacaaaaatctgaattagttcatgagccttaatgtaaatctcttgctgaaatagtttttaaaatcagaatttagttatctatcagactcaaaatcatttaaagactaacaaaacacaatcatgatattctaactgtggtcaaaccaggtacccaagccacctccctgcccaacgcctttccggcttttcccctccctcttgggctggtggttatgctcctccagctctagttcagctataattccttttatagagaaaccaacctgatacacactttcatgatgggagaaaaatgtgggagtgaaatggtatttagaaagcagcagtcaggcacggtggctcatgcctgtaatcccagcactttgggaggctgaggcaggcggatcacttgaggtcaggagctcgagaccagcctggccaacacggtgaaaccccatctctactaaaaaaaaatacaaaaattagccgggcgtggtggcaggcacctgtaatcccagctacttgggaggctgaggcaggagaaatcgcctgaacccagaaggcagaggttgcagtgagccaagatcacatcactgcactgcactccagccggggtgacagagcgaacctctgtctcaaaaaaaaaaaaagaaaaaagaaagaaagaaaaaaggcagaagccctggattcaaatccgccacacattcagtttctttatctgtaaaatggagaccaccccccgccacgctgaacggtgattctgtgactggtaagagatgctacatttttggtgcttgttcaggtggaggaaagatgatagttaacactcaggtaataagtattttgaaggcagtataatataccttcttaaagagtatacctactcaaatgttggtaaatgttgacatgattgaatctaaatggcaaagagtattttagaaaaacattaagtccctgcagataaatgacagtgttgatttggatgcttaattacattcagacatgaactgttggatgtatctgaaatgttaaaagctttttctcaacatttccaaaagtctttccaagaaatcaatgttatgttttgttccagaagcaaatttgcatttgtgatctgtttctaaaaatggtacaagttagctctgtttagaaagtaaaaatatctgatgttagattggaagtatctcttcctggggaatccagaaagataagcatagcatattgtcttactgcaatagataagttgcttattgagaagtctggttgttattctatatggtaacaatacagttgatgtatattttatgatagatcctttatattttcctcatgactttagaagggggaagggggagaaaattatgatgaccagactagttaaagagcattgaaagtccacagtactgtagctaaagtagaagtttgggtttgttatagactttacattatatcaactaataagcagatactgtacagtattgctcaccattttatcatacttttgcatatgaactactccattgccttttatagatgttttatagctgatcttaccagttttcctggtaactttttttatttcttttttttttttttgagacggagtctcgccctaacacccaggttggagtgcagtgccgtgatctcggctcactgcaacctctgcctcccgggttcaagcaattctcctgtctcagcctcccgagtacctgggactaccggtgcctgtctccacgcccggctaattttttgtatttgtagtagagacggggtttcaccgtgttagccaggatggtctcgatctcctgacctcatgatctgcctgcctctgcctggacctcccaaagtgctgggattacaggcgtgagcccccgcgcccagccactttctttaatactataactaagaatttattaaaatgcacaaattgtctaagactgtaaagtttattggggagaggccatgactacctctgaatttagtaaatttaaaatatttctgattctcaataaagaactaatatccatataaaaaaaaaaaaaaaaa

SEQ ID NO: 224 - protein, 443 aa, Homo sapiens
MDFPCLWLGLLLPLVAALDFNYHRQEGMEAFLKTVAQNYSSVTHLHSIGKSVKGRNLWVLVVGRFPKEHRIGIPEFKYVANMHGDETVGRELLLHLIDYLVTSDGKDPEITNLINSTRIHIMPSMNPDGFEAVKKPDCYYSIGRENYNQYDLNRNFPDAFEYNNVSRQPETVAVMKWLKTETFVLSANLHGGALVASYPFDNGVQATGALYSRSLTPDDDVFQYLAHTYASRNPNMKKGDECKNKMNFPNGVTNGYSWYPLQGGMQDYNYIWAQCFEITLELSCCKYPREEKLPSFWNNNKASLIEYIKQVHLGVKGQVFDQNGNPLPNVIVEVQDRKHICPYRTNKYGEYYLLLLPGSYIINVTVPGHDPHITKVIIPEKSQNFSALKKDILLPFQGQLDSIPVSNPSCPMIPLYRNLPDHSAATKPSLFLFLVSLLHIFFK

SEQ ID NO: 225 - DNA, 2873 bp, Homo sapiens
cggcacgcccgggaggctttctctggctggtaaccgctactcccggacaccagaccaccgccttccgtacacaggggcccgcatcccaccctcccggacctaagagcctgggtcccctgtttccggaggtccgcttcccggcccccagattctggcatcccagccctcagtgtccaagacccaggcagcccgggtccccgcctcccggatccaggcgtccgggatctgcgccaccagaacctagcctcctgcagacctccgccatctgggggcactcaacctcctggagccaagggccccacgtcccacccagagaaactctcgtattcccagctcctagggccaaggaacccgggcgctccgaactcccagctttcggacatctggcacacggggcagagcagagaagcctcagcgcccagcctggggaatttaaacactccagcttccaagagccaaggaacttcagtgctgtgaactcacaactctaaggagccctccaaagttccagtctccaggtgctgttactcaactcagtcctaggaacgtcgggtcctgggaaggagcccaagcgctcccagccagcttccaggcgctaagaaaccccggtgcttcccatcatggtggccgatcctcctcgagactccaaggggctcgcagcggcggagcccaccgccaacgggggcctggcgctggcctccatcgaggaccaaggcgcggcagcaggcggctactgcggttcccgggaccaggtgcgccgctgccttcgagccaacctgcttgtgctgctgacagtggtggccgtggtggccggcgtggcgctgggactgggggtgtcgggggccgggggtgcgctggcgttgggcccggagcgcttgagcgccttcgtcttcccgggcgagctgctgctgcgtctgctgcggatgatcatcttgccgctggtggtgtgcagcttgatcggcggcgccgccagcctggaccccggcgcgctcggccgtctgggcgcctgggcgctgctctttttcctggtcaccacgctgctggcgtcggcgctcggagtgggcttggcgctggctctgcagccgggcgccgcctccgccgccatcaacgcctccgtgggagccgcgggcagtgccgaaaatgcccccagcaaggaggtgctcgattcgttcctggatcttgcgagaaatatcttcccttccaacctggtgtcagcagcctttcgctcatactctaccacctatgaagagaggaatatcaccggaaccagggtgaaggtgcccgtggggcaggaggtggaggggatgaacatcctgggcttggtagtgtttgccatcgtctttggtgtggcgctgcggaagctggggcctgaaggggagctgcttatccgcttcttcaactccttcaatgaggccaccatggttctggtctcctggatcatgtggtacgcccctgtgggcatcatgttcctggtggctggcaagatcgtggagatggaggatgtgggtttactctttgcccgccttggcaagtacattctgtgctgcctgctgggtcacgccatccatgggctcctggtactgcccctcatctacttcctcttcacccgcaaaaacccctaccgcttcctgtggggcatcgtgacgccgctggccactgcctttgggacctcttccagttccgccacgctgccgctgatgatgaagtgcgtggaggagaataatggcgtggccaagcacatcagccgtttcatcctgcccatcggcgccaccgtcaacatggacggtgccgcgctcttccagtgcgtggccgcagtgttcattgcacagctcagccagcagtccttggacttcgtaaagatcatcaccatcctggtcacggccacagcgtccagcgtgggggcagcgggcatccctgctggaggtgtcctcactctggccatcatcctcgaagcagtcaacctcccggtcgaccatatctccttgatcctggctgtggactggctagtcgaccggtcctgtaccgtcctcaatgtagaaggtgacgctctgggggcaggactcctccaaaattacgtggaccgtacggagtcgagaagcacagagcctgagttgatacaagtgaagagtgagctgcccctggatccgctgccagtccccactgaggaaggaaaccccctcctcaaacactatcgggggcccgcaggggatgccacggtcgcctctgagaaggaatcagtcatgtaaaccccgggagggaccttccctgccctgctgggggtgctctttggacactggattatgaggaatggataaatggatgagctagggctctgggggtctgcctgcacactctggggagccaggggccccagcaccctccaggacaggagatctgggatgcctggctgctggagtacatgtgttcacaagggttactcctcaaaacccccagttctcactcatgtccccaactcaaggctagaaaacagcaagatggagaaataatgttctgctgcgtccccaccgtgacctgcctggcctcccctgtctcagggagcaggtcacaggtcaccatggggaattctagcccccactggggggatgttacaacaccatgctggttattttggcggctgtagttgtggggggatgtgtgtgtgcacgtgtgtgtgtgtgtgtgtgtgtgtgtgtgtgtgtgtgttctgtgacctcctgtccccatggtacgtcccaccctgtccccagatcccctattccctccacaataacagaaacactcccagggactctggggagaggctgaggacaaatacctgctgtcactccagaggacattttttttagcaataaaattgagtgtcaactatttaa

SEQ ID NO: 226 - protein, 541 aa, Homo sapiens
MVADPPRDSKGLAAAEPTANGGLALASIEDQGAAAGGYCGSRDQVRRCLRANLLVLLTVVAVVAGVALGLGVSGAGGALALGPERLSAFVFPGELLLRLLRMIILPLVVCSLIGGAASLDPGALGRLGAWALLFFLVTTLLASALGVGLALALQPGAASAAINASVGAAGSAENAPSKEVLDSFLDLARNIFPSNLVSAAFRSYSTTYEERNITGTRVKVPVGQEVEGMNILGLVVFAIVFGVALRKLGPEGELLIRFFNSFNEATMVLVSWIMWYAPVGIMFLVAGKIVEMEDVGLLFARLGKYILCCLLGHAIHGLLVLPLIYFLFTRKNPYRFLWGIVTPLATAFGTSSSSATLPLMMKCVEENNGVAKHISRFILPIGATVNMDGAALFQCVAAVFIAQLSQQSLDFVKIITILVTATASSVGAAGIPAGGVLTLAIILEAVNLPVDHISLILAVDWLVDRSCTVLNVEGDALGAGLLQNYVDRTESRSTEPELIQVKSELPLDPLPVPTEEGNPLLKHYRGPAGDATVASEKESVM

SEQ ID NO: 227 - DNA, 3060 bp, Homo sapiens
cagcatcgccttttcctcccgtttctccttccactcccagctccacatcctcctcctattctcccctctcccctcttcaaacccccaccttccagttccctcacctcccctttcggctggtcccctggggcttgcagcaagagggagagagagctcctgacaggattgatggtccttccccaccctgtcctctcatccgctccctccccagcaggcacagacatccccctacaaaaggcaggagcccaggctgtgtggaaacagctgctctcagacgcctttccatttgctctctgctggctaggctgggctgtgcctctgctccctcttcctctagctgagagtgggcacctggggtaccgggcccccccacctcattccccatgaatgctgtgggaagtcctgaggggcaggagctgcaaaagctggggagtggagcctgggacaaccccgcctacagtggtcccccttccccacacgggacgctgagagtctgcaccatctccagcacggggcctctccagccccaacccaagaagcctgaagatgaaccccaggagacggcatacaggacccaggtgtccagctgctgcctccatatctgtcaaggcatcagaggactttggggaacaaccctgactgagaacacagctgagaaccgggaactttatatcaagaccaccctgagggagctgttggtatatattgtgttcctggtggacatctgtctactgacctatggaatgacaagctccagtgcttattactacaccaaagtgatgtctgagctcttcttacatactccatcagacactggagtctcctttcaggccatcagcagcatggcggacttctgggattttgcccagggcccactactggacagtttgtattggaccaaatggtacaacaaccagagcctgggccatggctcccactccttcatctactatgagaacatgctgctgggggttccgaggctgcggcagctaaaggtccgcaatgactcctgtgtggtgcatgaagacttccgggaggacattctgagctgctatgatgtctactctccagacaaagaagaacaactcccctttgggcccttcaatggcacagcgtggacataccactcgcaggatgagttggggggcttctcccactggggcaggctcacaagctacagcggaggtggctactacctggaccttccaggatcccgacagggtagtgcagaggctctccgggcccttcaggaggggctgtggctggacaggggcactcgagtggtgttcatcgacttctcagtctacaatgccaatatcaatcttttctgtgtcctgaggctggtggtggagtttccagctacaggaggtgccatcccatcctggcaaatccgcacagtcaagctgatccgctatgtcagcaactgggacttctttatcgttggctgtgaggtcatcttctgcgtcttcatcttctactatgtggtggaagagatcctggagctccacattcaccggcttcgctacctcagcagcatctggaacatactggacctggtggtcatcttgctctccattgtggctgtgggcttccacatattccgaaccctcgaggtgaatcggctcatggggaagctcctgcagcagccaaacacgtatgcagactttgagttcctcgccttctggcagacacagtacaacaacatgaatgctgtcaacctcttcttcgcctggatcaagatattcaagtacatcagcttcaacaaaaccatgacccagctctcctccacgctggcccgctgtgccaaggacatcctgggcttcgccgtcatgttcttcattgttttcttcgcctatgcccaactcggctacctgcttttcgggacccaagtggaaaactttagcactttcatcaagtgcattttcactcagttccggataatcctcggggactttgactacaatgctatcgacaatgccaaccgcatcctgggccctgcctactttgtcacctatgtcttcttcgtcttcttcgtgctcctgaacatgttcctggccatcatcaatgacacatattcagaggtcaaggaggagctggctggacagaaggatgagctgcaactttctgacctcctgaaacagggctacaacaagaccctactaagactgcgtctgaggaaggagagggtttcggatgtgcagaaggtcctgcagggtggggagcaggagatccagtttgaggatttcaccaacaccttaagggaactgggacacgcagagcatgaaatcactgagctcacggccaccttcaccaagtttgacagagatgggaatcgtattctggatgagaaggaacaggaaaaaatgcgacaggacctggaggaagagagggtggccctcaacactgagattgagaaactaggccgatctattgtgagcagcccacaaggcaaatcgggtccagaggctgccagagcaggaggctgggtttcaggagaagaattctacatgctcacaaggagagttctgcagctggagactgtcctggaaggagtagtgtcccagattgatgctgtaggctcaaagctgaaaatgctggagaggaaggggtggctggctccctccccaggcgtgaaggaacaagctatttggaagcacccgcagccagccccagctgtgaccccagacccctggggagtccagggtgggcaggagagtgaggttccctataaaagagaagaggaagccttagaggagaggagactctcccgtggtgagattccaacgttgcagaggagttaagtgtgaggcactcccggagcaaagtctatgaaggatcttctgcaagaggctgcctcctggtccactgaacctggaaactgagtgggctttaaccaggagataaaaatggagcctgaagggaatcaggcaaggaaatgaactcaggattcagagatctttgaattaatatgtggtgggttctgacattattcttccataagaccatgtgggtttccatggtggctatcaataaaactccttaggaaaacttaaaaaaaaa

SEQ ID NO: 228 - protein, 805 aa, Homo sapiens
MNAVGSPEGQELQKLGSGAWDNPAYSGPPSPHGTLRVCTISSTGPLQPQPKKPEDEPQETAYRTQVSSCCLHICQGIRGLWGTTLTENTAENRELYIKTTLRELLVYIVFLVDICLLTYGMTSSSAYYYTKVMSELFLHTPSDTGVSFQAISSMADFWDFAQGPLLDSLYWTKWYNNQSLGHGSHSFIYYENMLLGVPRLRQLKVRNDSCVVHEDFREDILSCYDVYSPDKEEQLPFGPFNGTAWTYHSQDELGGFSHWGRLTSYSGGGYYLDLPGSRQGSAEALRALQEGLWLDRGTRVVFIDFSVYNANINLFCVLRLVVEFPATGGAIPSWQIRTVKLIRYVSNWDFFIVGCEVIFCVFIFYYVVEEILELHIHRLRYLSSIWNILDLVVILLSIVAVGFHIFRTLEVNRLMGKLLQQPNTYADFEFLAFWQTQYNNMNAVNLFFAWIKIFKYISFNKTMTQLSSTLARCAKDILGFAVMFFIVFFAYAQLGYLLFGTQVENFSTFIKCIFTQFRIILGDFDYNAIDNANRILGPAYFVTYVFFVFFVLLNMFLAIINDTYSEVKEELAGQKDELQLSDLLKQGYNKTLLRLRLRKERVSDVQKVLQGGEQEIQFEDFTNTLRELGHAEHEITELTATFTKFDRDGNRILDEKEQEKMRQDLEEERVALNTEIEKLGRSIVSSPQGKSGPEAARAGGWVSGEEFYMLTRRVLQLETVLEGVVSQIDAVGSKLKMLERKGWLAPSPGVKEQAIWKHPQPAPAVTPDPWGVQGGQESEVPYKREEEALEERRLSRGEIPTLQRS

SEQ ID NO: 229 - DNA, 5235 bp, Homo sapiens
gcggggagctcgcaccgccgcgcccgggccgcgagtgatgataacctaagaggccggcgcgggcgggcgtgagcggcggaggagccgggcgcggcgacacgcggccatggagcgggagccggcggggaccgaggagcccgggcctccgggacggcggaggcgccgagagggcaggacgcgcacggtgcgctccaacctgctgccgcccccgggcgccgaggaccctgcggctggcgcggccaagggcgagcggcgacggcggcgcgggtgtgcccagcacctggccgacaaccggctcaagactaccaagtacacgctgctgtccttcctgcccaagaacctgttcgagcagttccaccgcccggccaacgtgtactttgtcttcatcgcgctgctcaacttcgtgccggcggtgaacgccttccagcccggcctggcactggcgccggtgctcttcatcctggccatcacggccttcagggacctgtgggaggactacagccgccaccgctccgaccacaagatcaaccacctgggctgcctggtcttcagcagggaagaaaagaaatacgtgaaccgattctggaaagaaatccacgtgggagactttgtgcgtcttcgctgcaacgaaatcttccctgcggacattctgctgctctcctccagtgaccccgacgggctatgccacatcgagaccgccaacctggatggagagaccaacctgaagcggcggcaggtggtccgcggcttctcggagcttgtctccgaattcaatcctttgacgttcaccagcgtgatcgaatgcgagaagccaaacaacgacctgagtaggtttcgcggctgcatcatacatgacaacgggaaaaaggccgggctgtataaagaaaacctgctgctgaggggctgcacccttaggaacacggacgcagtcgtcggcattgtcatctacgcaggacatgaaaccaaggctctgctgaacaacagtgggccccgctacaagcgcagcaagctggagaggcagatgaactgcgacgtgctctggtgtgtcctgctccttgtttgcatgtctctgttttcagcagtcggacatggactgtggatatggcggtatcaagagaagaagtcattattttatgtccccaagtctgatggaagctccttatccccagtcacagctgcagtttactcatttttaacaatgataatagttctgcaggttttgatcccaatttccttatacgtttccattgaaattgttaaagcatgccaagtgtacttcattaaccaggacatgcagttgtatgacgaagaaacagactcgcagctgcagtgccgagctctgaacatcacggaagacttaggacagatacagtacattttctcagataaaactggcactttgacagagaataagatggttttccgaagatgcactgtgtctggtgtagaatattctcatgatgcaaatgcgcagcgtctggccaggtaccaagaggcagactcggaggaggaggaggtggtgcccagagggggctcggtgtcccagcgcggcagcatcggcagccaccagagtgtccgggtggtgcacagaacccagagcaccaagtcccaccggcgcacgggcagccgggccgaggccaagagggccagcatgctgtccaagcacacggccttcagcagccccatggagaaggatatcacgcccgacccaaagctgctggagaaggtgagtgagtgtgacaagagcctagccgtggcgaggcatcaggagcacctgctggcccacctctcgcctgagctgtctgacgtctttgatttcttcatcgcactcaccatctgcaacacagtcgtcgtcacgtccccggatcagccacgaacaaaggtgagggtgaggtttgagctgaagtccccggtgaagacgatagaagacttcctgcggaggttcacacccagctgcctgacctcaggctgcagcagcatcgggagcctggccgccaacaagtccagccacaagttgggctccagcttcccgtccaccccgtccagcgacggcatgcttctcaggctggaggagaggctgggccagcccacctcggccatcgccagcaacggctacagcagccaggcggacaactgggcctcggagcttgctcaggagcaggagtcagagcgcgagctgcggtacgaggcggagagcccggatgaggccgcactggtgtatgcggccagagcctacaactgcgtgcttgtggagcggctgcacgaccaagtgtcagtggagctgccccacctgggcaggctcaccttcgagctcctgcacacactgggtttcgattccgtccgcaagaggatgtcagtggtgatccggcacccgcttaccgatgagatcaacgtctacaccaagggggccgactcagtggtcatggatctcctgcagccctgctcttcagttgacgccagagggaggcatcaaaaaaagattcggagcaaaactcagaattacctcaacgtgtatgcggcggaaggcctgcgcaccttgtgcatcgccaagagagttctgagtaaagaagagtatgcctgctggttgcaaagccacctagaagccgaatcctccctggaaaacagcgaggagctcctcttccagtctgccattcgcctggagaccaacctgcacttgttaggtgccactgggattgaagaccgcctgcaggacggagtccctgaaactatttctaaattgcgtcaagcgggcctgcagatttgggttctcactggtgacaaacaagaaacagctgtcaacattgcatatgcctgcaaactgctggaccacgacgaggaggtcatcaccctgaatgccacctcccaggaggcgtgtgcagccctgctagaccagtgcctatgctacgtgcagtccagaggcctccagagagcccctgagaagaccaagggcaaagtgagcatgaggttctcctctctctgcccaccctccacgtccactgcctctggccgcagacccagcctcgtgatcgatgggagaagcctggcctacgctctcgagaaaaacctggaggacaaattcctcttccttgccaagcagtgccgctccgtcctctgctgtcggtcgacgcctctgcagaagagcatggtggtgaagctggtgcggagcaagctcaaggccatgaccctggccataggtgatggagccaatgatgtcagcatgatccaggtggcagatgtgggtgtgggaatctccggccaggagggtatgcaggcagtgatggccagcgactttgcagtgccgaaattccgatacctggagaggctcttgattcttcacgggcattggtgctactcccgacttgccaacatggtgctgtacttcttctacaaaaacacaatgttcgtgggcctcctgttttggttccagtttttctgtggcttctctgcatctaccatgattgaccagtggtatctaatcttctttaatctgctcttctcgtcacttcccccgctcgtgactggggtgctggacagggatgtgccagccaatgtgctgctgaccaacccgcagctctacaagagtggccagaacatggaggaataccggccacgaacgttctggtttaacatggccgacgccgccttccagagcctggtttgcttttccattccttacctggcctactatgactcgaacgtggacctgtttacctgggggacccctattgtgacaatcgcgctgctcactttcctgctccacctgggcattgaaaccaaaacctggacctggctcaactggataacgtgtggcttcagtgtccttttgtttttcaccgtggctttgatttacaatgcgtcttgtgccacgtgctatcctccgtccaacccttactggactatgcaagccttactgggtgacccagtgttttacttgacttgcctgatgacgcctgtcgctgcactgctgcccagattgtttttcagatccctccaggggagggttttccccacacaacttcagctggcacgtcagttgaccaggaagtcccccaggagatgcagtgctcccaaagagacctttgctcagggacgcctcccgaaggactcgggaaccgagcactcatcagggaggacagtcaagacctctgtgcccctgtcccagccttcttggcacacacagcagccggtctgctccctggaggccagcggggagcccagcacagtggacatgagcatgccagtgagggagcacaccctgctggaggggctgagcgcaccggcccccatgtcctctgcgccaggggaggctgtcctgaggagtccaggagggtgtcctgaggagtccaaggtgagagctgccagcaccggcagggtgacccccctgtcttccctcttcagcctgcctaccttcagcttactcaactggatttcctcctggtcgctggtcagcaggctggggagtgtcttacagttctcccggacggagcagcttgcagatggacaagcgggacgtggacttcctgtccagccccactcaggccgatcaggacttcaagggccagaccacagactacttataggagcatcttcaaggcggtcacagtgaaaaccttgaaatggccttttttaatatatataaataaatgttaatattatttatgtttattatttgcacagaagagttctagggagatgtatttctaaatgtttcccaggctaatacaggaaacaagaggtaccaaaaaagaaagtttattttttaaaattctaagtagagtatattgaaaagaaaaagaagagccttaacatatataaaagtttaaagaagagtaacacttgaaaagtgtgtttagatttattttttcatctcatttttaagaacaagcagtacgatttgttttcttcaacatgtgtgactgcgcactgagtacaaatgtgtgactgctcatggttaatgcaggcaggtgtgaacatgggggaacaatgagcagagatggcagagggcagagcacatggcccccagaggcttccagtctcactgacacaggagggctgggctccacttcatccagatgaaggaaaggaagacctcaagaaaaattcacagttgagtgcatcccagcattctgttccgggcaggcatttcaggaagaccgccttgtaggtattacatccctggtgtcgtattttgcctgttaaatcgtaacaagcaataaacaactttcactttgcaaa

SEQ ID NO: 230 - protein, 1499 aa, Homo sapiens
MEREPAGTEEPGPPGRRRRREGRTRTVRSNLLPPPGAEDPAAGAAKGERRRRRGCAQHLADNRLKTTKYTLLSFLPKNLFEQFHRPANVYFVFIALLNFVPAVNAFQPGLALAPVLFILAITAFRDLWEDYSRHRSDHKINHLGCLVFSREEKKYVNRFWKEIHVGDFVRLRCNEIFPADILLLSSSDPDGLCHIETANLDGETNLKRRQVVRGFSELVSEFNPLTFTSVIECEKPNNDLSRFRGCIIHDNGKKAGLYKENLLLRGCTLRNTDAVVGIVIYAGHETKALLNNSGPRYKRSKLERQMNCDVLWCVLLLVCMSLFSAVGHGLWIWRYQEKKSLFYVPKSDGSSLSPVTAAVYSFLTMIIVLQVLIPISLYVSIEIVKACQVYFINQDMQLYDEETDSQLQCRALNITEDLGQIQYIFSDKTGTLTENKMVFRRCTVSGVEYSHDANAQRLARYQEADSEEEEVVPRGGSVSQRGSIGSHQSVRVVHRTQSTKSHRRTGSRAEAKRASMLSKHTAFSSPMEKDITPDPKLLEKVSECDKSLAVARHQEHLLAHLSPELSDVFDFFIALTICNTVVVTSPDQPRTKVRVRFELKSPVKTIEDFLRRFTPSCLTSGCSSIGSLAANKSSHKLGSSFPSTPSSDGMLLRLEERLGQPTSAIASNGYSSQADNWASELAQEQESERELRYEAESPDEAALVYAARAYNCVLVERLHDQVSVELPHLGRLTFELLHTLGFDSVRKRMSVVIRHPLTDEINVYTKGADSVVMDLLQPCSSVDARGRHQKKIRSKTQNYLNVYAAEGLRTLCIAKRVLSKEEYACWLQSHLEAESSLENSEELLFQSAIRLETNLHLLGATGIEDRLQDGVPETISKLRQAGLQIWVLTGDKQETAVNIAYACKLLDHDEEVITLNATSQEACAALLDQCLCYVQSRGLQRAPEKTKGKVSMRFSSLCPPSTSTASGRRPSLVIDGRSLAYALEKNLEDKFLFLAKQCRSVLCCRSTPLQKSMVVKLVRSKLKAMTLAIGDGANDVSMIQVADVGVGISGQEGMQAVMASDFAVPKFRYLERLLILHGHWCYSRLANMVLYFFYKNTMFVGLLFWFQFFCGFSASTMIDQWYLIFFNLLFSSLPPLVTGVLDRDVPANVLLTNPQLYKSGQNMEEYRPRTFWFNMADAAFQSLVCFSIPYLAYYDSNVDLFTWGTPIVTIALLTFLLHLGIETKTWTWLNWITCGFSVLLFFTVALIYNASCATCYPPSNPYWTMQALLGDPVFYLTCLMTPVAALLPRLFFRSLQGRVFPTQLQLARQLTRKSPRRCSAPKETFAQGRLPKDSGTEHSSGRTVKTSVPLSQPSWHTQQPVCSLEASGEPSTVDMSMPVREHTLLEGLSAPAPMSSAPGEAVLRSPGGCPEESKVRAASTGRVTPLSSLFSLPTFSLLNWISSWSLVSRLGSVLQFSRTEQLADGQAGRGLPVQPHSGRSGLQGPDHRLLIGASSRRSQ

SEQ ID NO: 231 - DNA, 2187 bp, Homo sapiens
actgcagagagctgaggcaccatgcatgggggccaggggccgctgctcctcctgctgctgctggctgtctgcctgggggcccagggccggaaccaggaggagcgcctgctcgcagacctgatgcaaaactacgaccccaacctgcggcccgcggaacgagactcggatgtggtcaatgtcagcctgaagctaaccctcaccaacctcatctccctgaacgagcgagaggaagccctcaccaccaatgtctggatagagatgcagtggtgcgactatcgcctgcgctgggatccgcgagactacgaaggcctgtgggtgctgagggtgccgtccaccatggtgtggcggccggatatcgtgctggagaacaacgtggacggtgtcttcgaggtggccctctactgcaatgtgctcgtgtcccctgacggctgtatctactggctgccgcctgccatcttccgttccgcctgctctatctcagtcacctacttccccttcgactggcagaactgctcccttatcttccagtcccagacttacagcaccaatgagattgatctgcagctgagtcaggaagatggccagaccatcgagtggattttcattgaccctgaggccttcacagagaatggggagtgggccatccagcaccgaccagccaagatgctcctggacccagcggcgccagcccaggaagcaggccaccagaaggtggtgttctacctgctcatccagcgcaagcccctcttctacgtcatcaacatcatcgccccctgtgtgctcatctcctctgtcgccatcctcatccacttccttcctgccaaggctgggggccagaagtgtaccgtcgccatcaacgtgctcctggcccagactgtcttcctcttccttgtggccaagaaggtgcctgaaacctcccaggcggtgccactcatcagcaagtacctgaccttcctcctggtggtgaccatcctcattgtcgtgaatgctgtggttgtgctcaatgtctccttgcggtctccacacacacactccatggcccgaggggtccgcaaggtgttcctgaggctcttgccccagctgctgaggatgcacgttcgcccgctggccccggcagctgtgcaggacacccagtcccggctacagaatggctcctcgggatggtcgatcacaactggggaggaggtggccctctgcctgcctcgcagtgaactcctcttccagcagtggcagcggcaagggctggtggcggcagcgctggagaagctagagaaaggcccggagttagggctgagccagttctgtggcagcctgaagcaggctgccccagccatccaggcctgtgtggaagcctgcaacctcattgcctgtgcccggcaccagcagagtcactttgacaatgggaatgaggagtggttcctggtgggccgagtgctggaccgcgtctgcttcctggccatgctctcgctcttcatctgtggcacagctggcatcttcctcatggcccactacaaccgggtgccggccctgccattccctggagatccacgcccctacctgccctcaccagactgagccaaccaaccactgtggggcatgtgggagtcacacacgtgggtcacactgagtcttatcagccacgttctcctactgaggtcctaagtgtgctctttgggaagtgcccttcaggactgtgtgagccaaacagccctgagaaaagctggggaaacagtctgagctggagtccgagagtggttgggggtgggccgtggctagtgtcctgctgcagtcagcacacacgtgggattggctagctcatcctggcaccagccacccctccactcagtgcactcccctcacttaggcaaagcattattcattcccatcagtctgaagcccgaaggactgttttgtataataccttcggacttgggactggctccccttttacaagttctccctgaaagagggcagtcacaagaggtgtgaagagtagcagccgatgctctctccaaagcagggcagcagcccataccagctggcatctcccccccgtgccttctgggtacaataagcacccaattctcaacagccccagtggcctttccattcatgtgcatttttctgccactgaccacaagacgatttcctgagttttgtaatcctctttttttttttttttttttt

SEQ ID NO: 232 - protein, 517 aa, Homo sapiens
MHGGQGPLLLLLLLAVCLGAQGRNQEERLLADLMQNYDPNLRPAERDSDVVNVSLKLTLTNLISLNEREEALTTNVWIEMQWCDYRLRWDPRDYEGLWVLRVPSTMVWRPDIVLENNVDGVFEVALYCNVLVSPDGCIYWLPPAIFRSACSISVTYFPFDWQNCSLIFQSQTYSTNEIDLQLSQEDGQTIEWIFIDPEAFTENGEWAIQHRPAKMLLDPAAPAQEAGHQKVVFYLLIQRKPLFYVINIIAPCVLISSVAILIHFLPAKAGGQKCTVAINVLLAQTVFLFLVAKKVPETSQAVPLISKYLTFLLVVTILIVVNAVVVLNVSLRSPHTHSMARGVRKVFLRLLPQLLRMHVRPLAPAAVQDTQSRLQNGSSGWSITTGEEVALCLPRSELLFQQWQRQGLVAAALEKLEKGPELGLSQFCGSLKQAAPAIQACVEACNLIACARHQQSHFDNGNEEWFLVGRVLDRVCFLAMLSLFICGTAGIFLMAHYNRVPALPFPGDPRPYLPSPD

SEQ ID NO: 233 - DNA, 4148 bp, Homo sapiens
gtctgtccccatctctcaatctcatgctgagtctctctgtctccaactgcctgtcactgtctttgtgtctctgtgactctcatttctttttttctgtctcctgctgtctctgtgtgggattccttgtctctctgcccctgccctccctctcctatctgaaccctggtctctgtgtcccttagggcttatcacaccgttctccccagagtcaccgggaggagagccgggactggacacaagccagggctgggacaatggcagtgcctagtctgtggccctggggagcatgcctgcctgtgatcttcctctccttgggatttggcctggatacagtagaggtgtgccccagcctggatattcgctcagaggtggcagagcttcgtcagctggagaactgcagcgtggtggagggccacctgcagatcctgctcatgttcacagccaccggggaggacttccgcggcctcagcttccctcgcctcacccaggtcaccgactacctgctgctcttccgtgtctacggactggagagcctgcgcgacctcttccccaacctagcagtcatccgcgggacgcgcctcttcctgggctatgcactggtcatctttgagatgccacatctgcgtgacgtggcactgcctgcacttggggccgtgctgcgtggggctgtgcgtgtggagaagaaccaggagctctgccacctctccaccattgactggggactgctgcagccagcacctggcgccaaccacatcgtgggcaacaagctgggcgaggagtgtgctgacgtgtgccctggtgtgctgggtgctgctggtgagccctgtgccaagaccaccttcagcgggcacactgactacagatgctggacctccagccactgccagagagtgtgcccctgcccccatgggatggcttgcacagcgaggggcgagtgctgccacaccgaatgcctggggggctgcagccagccagaagaccctcgtgcctgtgtagcttgccgccacctctacttccagggtgcctgcctgtgggcctgcccgccaggcacctaccagtatgagtcctggcgctgtgtcacagctgagcgctgtgccagcctgcactctgtgcccggccgtgcctccaccttcggcatacaccagggcagttgcctggcccagtgcccttctggcttcacccgtaatagcagcagcatattctgccacaagtgcgaggggctgtgccctaaagagtgcaaggtaggcaccaagaccatcgactccatccaggcggcacaggatcttgtgggctgcacgcatgtggagggaagcctcatcctcaaccttcgccagggctacaacctggagccacagctgcagcacagcctggggctggtagaaaccattactggcttcctcaaaatcaagcactcctttgccctcgtgtccctgggctttttcaagaacctcaaactaatccggggagacgccatggtggatgggaactacactctctacgtgctggacaaccagaacctacaacagctagggtcctgggtggccgcggggctcaccattcccgtgggcaagatctacttcgccttcaacccgcgcctctgcttggaacacatctaccgactggaggaggtgacaggcacgcgaggtcggcagaacaaggctgagatcaacccccgcaccaacggagaccgcgccgcctgccagactcgcaccctgcgcttcgtgtccaacgtgacggaggcagaccgcatcctgctacgctgggagcgctatgagccactggaggcccgcgacctgctcagcttcatcgtgtactacaaggagtccccattccagaacgccacagagcacgtgggtccagatgcttgtggaacccagagctggaacctgctggatgtggagctgcccctaagccgcacccaggagccaggggtgaccctagcctccctcaagccttggacacagtacgcagtgtttgtgcgggccatcacgctaaccactgaggaggacagccctcatcaaggagcccagagtcccatcgtctacctccgaacgctgcctgcagctcccacggtgccccaagacgtcatctccacgtccaactcctcctcccacctcctggtgcgctggaagccaccgacccagcgcaatgggaacctcacctactacctggtgctgtggcagcggctggcagaggacggcgacctctacctcaatgactactgccaccgcggcttgcggctgcccaccagcaacaacgatccgcgcttcgacggcgaagacggggatcctgaggccgagatggagtccgactgctgcccttgccagcacccacctcctggtcaggttctgcccccgctggaggcgcaagaggcctcgttccagaagaagtttgaaaactttctacacaacgcgatcaccatccccatatccccttggaaggtgacgtccatcaacaagagcccccaaagggactcagggcggcaccgccgggcagctgggcccctccggctggggggcaacagctcggatttcgagatccaggaggacaaggtgccccgtgagcgagcggtgctgagcggcctgcgccacttcacggaataccggatcgacatccatgcctgcaaccacgcggcgcacaccgtgggctgcagcgccgccaccttcgtctttgcgcgcaccatgccccacagagaggctgatggtattccaggaaaggtggcctgggaggcctccagcaagaacagtgtccttctgcgctggctcgagccaccagaccccaacggactcatcctcaagtacgaaatcaagtaccgccgcttgggagaggaggccacagtgctgtgtgtgtcccgtcttcgatatgcgaagtttgggggagtccacctggccctgctgccccctggaaactactctgccagggttagggcaacctcactggctggcaatggctcttggacagacagtgttgccttctacatccttggcccagaggaggaggatgctggggggctgcatgtcctcctcactgccacccctgtggggctcacgctgctcatcgttcttgctgcccttggtttcttctacggcaagaagagaaacagaaccctgtatgcttctgtgaatccagagtacttcagcgcctctgatatgtatgtccctgatgaatgggaggtgcctcgggagcagatctcgataatccgggaactgggccagggctcttttgggatggtatatgaggggctggcacgaggacttgaggctggagaggagtccacacccgtggccctgaagacggtgaatgagctggccagcccacgggaatgcattgagttcctcaaggaagcttctgtcatgaaagccttcaagtgtcaccatgtggtgcgtctcctgggtgtggtatctcagggccagccaactctggtcatcatggagttaatgacccgtggggacctcaagagccatcttcgatctttgcggcctgaggcagagaacaaccctgggctcccacagccagcattgggggaaatgatccaaatggctggtgagattgcagacggcatggcctaccttgctgccaacaagtttgtgcaccgagatctagcagcccgcaactgcatggtgtcccaggacttcaccgtcaagatcggggacttcgggatgactcgggacgtgtatgagacagactattaccgcaagggtgggaaggggctgctgcccgtgcgctggatggcccccgagtccctcaaagatgggatcttcaccacccactcggatgtctggtcctttggcgtggtactctgggagattgtgaccctggcagaacaaccctaccagggcctgtccaatgagcaggtgctgaagttcgtcatggatggcggggtcctggaggagctggagggctgtccccttcagctgcaggagctgatgagccgctgctggcagccgaacccacgcctgcgcccatctttcacacacattctggacagcatacaggaggagctgcggccctccttccgcctcctctccttctactacagcccggaatgccggggggcccggggctccctgcctaccaccgatgcagagcctgactcctcacccactccaagagactgcagccctcaaaatgggggtccagggcactga

SEQ ID NO: 234 - protein, 1297 aa, Homo sapiens
MAVPSLWPWGACLPVIFLSLGFGLDTVEVCPSLDIRSEVAELRQLENCSVVEGHLQILLMFTATGEDFRGLSFPRLTQVTDYLLLFRVYGLESLRDLFPNLAVIRGTRLFLGYALVIFEMPHLRDVALPALGAVLRGAVRVEKNQELCHLSTIDWGLLQPAPGANHIVGNKLGEECADVCPGVLGAAGEPCAKTTFSGHTDYRCWTSSHCQRVCPCPHGMACTARGECCHTECLGGCSQPEDPRACVACRHLYFQGACLWACPPGTYQYESWRCVTAERCASLHSVPGRASTFGIHQGSCLAQCPSGFTRNSSSIFCHKCEGLCPKECKVGTKTIDSIQAAQDLVGCTHVEGSLILNLRQGYNLEPQLQHSLGLVETITGFLKIKHSFALVSLGFFKNLKLIRGDAMVDGNYTLYVLDNQNLQQLGSWVAAGLTIPVGKIYFAFNPRLCLEHIYRLEEVTGTRGRQNKAEINPRTNGDRAACQTRTLRFVSNVTEADRILLRWERYEPLEARDLLSFIVYYKESPFQNATEHVGPDACGTQSWNLLDVELPLSRTQEPGVTLASLKPWTQYAVFVRAITLTTEEDSPHQGAQSPIVYLRTLPAAPTVPQDVISTSNSSSHLLVRWKPPTQRNGNLTYYLVLWQRLAEDGDLYLNDYCHRGLRLPTSNNDPRFDGEDGDPEAEMESDCCPCQHPPPGQVLPPLEAQEASFQKKFENFLHNAITIPISPWKVTSINKSPQRDSGRHRRAAGPLRLGGNSSDFEIQEDKVPRERAVLSGLRHFTEYRIDIHACNHAAHTVGCSAATFVFARTMPHREADGIPGKVAWEASSKNSVLLRWLEPPDPNGLILKYEIKYRRLGEEATVLCVSRLRYAKFGGVHLALLPPGNYSARVRATSLAGNGSWTDSVAFYILGPEEEDAGGLHVLLTATPVGLTLLIVLAALGFFYGKKRNRTLYASVNPEYFSASDMYVPDEWEVPREQISIIRELGQGSFGMVYEGLARGLEAGEESTPVALKTVNELASPRECIEFLKEASVMKAFKCHHVVRLLGVVSQGQPTLVIMELMTRGDLKSHLRSLRPEAENNPGLPQPALGEMIQMAGEIADGMAYLAANKFVHRDLAARNCMVSQDFTVKIGDFGMTRDVYETDYYRKGGKGLLPVRWMAPESLKDGIFTTHSDVWSFGVVLWEIVTLAEQPYQGLSNEQVLKFVMDGGVLEELEGCPLQLQELMSRCWQPNPRLRPSFTHILDSIQEELRPSFRLLSFYYSPECRGARGSLPTTDAEPDSSPTPRDCSPQNGGPGH

SEQ ID NO: 235 - DNA, 9790 bp, Homo sapiens
gcggcggcggctgcggcggtggggccgggcgaggtccgctgcggtcccggcggctccgtggctgctccgctctgagcgcctggcgcgccccgcgccctccctgccggggccgctgggccggggatgcacgcggggcccgggagccatggtccgcttcggggacgagctgggcggccgctatgggggccccggcggcggagagcgggcccggggcggcggggccggcggggcggggggcccgggtcccggggggctgcagcccggccagcgggtcctctacaagcaatcgatcgcgcagcgcgcgcggaccatggcgctgtacaaccccatcccggtcaagcagaactgcttcaccgtcaaccgctcgctcttcgtcttcagcgaggacaacgtcgtccgcaaatacgcgaagcgcatcaccgagtggcctccattcgagtatatgatcctggccaccatcatcgccaactgcatcgtgctggccctggagcagcacctccctgatggggacaaaacgcccatgtccgagcggctggacgacacggagccctatttcatcgggatcttttgcttcgaggcagggatcaaaatcatcgctctgggctttgtcttccacaagggctcttacctgcggaacggctggaacgtcatggacttcgtggtcgtcctcacagggatccttgccacggctggaactgacttcgacctgcgaacactgagggctgtgcgtgtgctgaggcccctgaagctggtgtctgggattccaagtttgcaggtggtgctcaagtccatcatgaaggccatggttccactcctgcagattgggctgcttctcttctttgccatcctcatgtttgccatcattggcctggagttctacatgggcaagttccacaaggcctgtttccccaacagcacagatgcggagcccgtgggtgacttcccctgtggcaaggaggccccagcccggctgtgcgagggcgacactgagtgccgggagtactggccaggacccaactttggcatcaccaactttgacaatatcctgtttgccatcttgacggtgttccagtgcatcaccatggagggctggactgacatcctctataatacaaacgatgcggccggcaacacctggaactggctctacttcatccctctcatcatcatcggctccttcttcatgctcaacctggtgctgggcgtgctctcgggggagtttgccaaggagcgagagagggtggagaaccgccgcgccttcctgaagctgcgccggcagcagcagatcgagcgagagctcaacgggtacctggagtggatcttcaaggcggaggaagtcatgctggccgaggaggacaggaatgcagaggagaagtcccctttggacgtgctgaagagagcggccaccaagaagagcagaaatgacctgatccacgcagaggagggagaggaccggtttgcagatctctgtgctgttggatcccccttcgcccgcgccagcctcaagagcgggaagacagagagctcgtcatacttccggaggaaggagaagatgttccggttttttatccggcgcatggtgaaggctcagagcttctactgggtggtgctgtgcgtggtggccctgaacacactgtgtgtggccatggtgcattacaaccagccgcggcggcttaccacgaccctgtattttgcagagtttgttttcctgggtctcttcctcacagagatgtccctgaagatgtatggcctggggcccagaagctacttccggtcctccttcaactgcttcgactttggggtcatcgtggggagcgtctttgaagtggtctgggcggccatcaagccgggaagctcctttgggatcagtgtgctgcgggccctccgcctgctgaggatcttcaaagtcacgaagtactggagctccctgcggaacctggtggtgtccctgctgaactccatgaagtccatcatcagcctgctcttcttgctcttcctgttcattgtggtcttcgccctgctggggatgcagctgtttgggggacagttcaacttccaggatgagactcccacaaccaacttcgacaccttccctgccgccatcctcactgtcttccagatcctgacgggagaggactggaatgcagtgatgtatcacgggatcgaatcgcaaggcggcgtcagcaaaggcatgttctcgtccttttacttcattgtcctgacactgttcggaaactacactctgctgaatgtctttctggccatcgctgtggacaacctggccaacgcccaagagctgaccaaggatgaagaggagatggaagaagcagccaatcagaagcttgctctgcaaaaggccaaagaagtggctgaagtcagccccatgtctgccgcgaacatctccatcgccgccaggcagcagaactcggccaaggcgcgctcggtgtgggagcagcgggccagccagctacggctgcagaacctgcgggccagctgcgaggcgctgtacagcgagatggaccccgaggagcggctgcgcttcgccactacgcgccacctgcggcccgacatgaagacgcacctggaccggccgctggtggtggagctgggccgcgacggcgcgcgggggcccgtgggaggcaaagcccgacctgaggctgcggaggcccccgagggcgtcgaccctccgcgcaggcaccaccggcaccgcgacaaggacaagacccccgcggcgggggaccaggaccgagcagaggccccgaaggcggagagcggggagcccggtgcccgggaggagcggccgcggccgcaccgcagccacagcaaggaggccgcggggcccccggaggcgcggagcgagcgcggccgaggcccaggccccgagggcggccggcggcaccaccggcgcggctccccggaggaggcggccgagcgggagccccgacgccaccgcgcgcaccggcaccaggatccgagcaaggagtgcgccggcgccaagggcgagcggcgcgcgcggcaccgcggcggcccccgagcggggccccgggaggcggagagcggggaggagccggcgcggcggcaccgggcccggcacaaggcgcagcctgctcacgaggctgtggagaaggagaccacggagaaggaggccacggagaaggaggctgagatagtggaagccgacaaggaaaaggagctccggaaccaccagccccgggagccacactgtgacctggagaccagtgggactgtgactgtgggtcccatgcacacactgcccagcacctgtctccagaaggtggaggaacagccagaggatgcagacaatcagcggaacgtcactcgcatgggcagtcagcccccagacccgaacactattgtacatatcccagtgatgctgacgggccctcttggggaagccacggtcgttcccagtggtaacgtggacctggaaagccaagcagaggggaagaaggaggtggaagcggatgacgtgatgaggagcggcccccggcctatcgtcccatacagctccatgttctgtttaagccccaccaacctgctccgccgcttctgccactacatcgtgaccatgaggtacttcgaggtggtcattctcgtggtcatcgccttgagcagcatcgccctggctgctgaggacccagtgcgcacagactcgcccaggaacaacgctctgaaatacctggattacattttcactggtgtctttacctttgagatggtgataaagatgatcgacttgggactgctgcttcaccctggagcctatttccgggacttgtggaacattctggacttcattgtggtcagtggcgccctggtggcgtttgctttctcaggatccaaagggaaagacatcaataccatcaagtctctgagagtccttcgtgtcctgcggcccctcaagaccatcaaacggctgcccaagctcaaggctgtgtttgactgtgtggtgaactccctgaagaatgtcctcaacatcttgattgtctacatgctcttcatgttcatatttgccgtcattgcggtgcagctcttcaaagggaagtttttctactgcacagatgaatccaaggagctggagagggactgcaggggtcagtatttggattatgagaaggaggaagtggaagctcagcccaggcagtggaagaaatacgactttcactacgacaatgtgctctgggctctgctgacgctgttcacagtgtccacgggagaaggctggcccatggtgctgaaacactccgtggatgccacctatgaggagcagggtccaagccctgggtaccgcatggagctgtccatcttctacgtggtctactttgtggtctttcccttcttcttcgtcaacatctttgtggctttgatcatcatcaccttccaggagcagggggacaaggtgatgtctgaatgcagcctggagaagaacgagagggcttgcattgacttcgccatcagcgccaaacccctgacacggtacatgccccaaaaccggcagtcgttccagtataagacgtggacatttgtggtctccccgccctttgaatacttcatcatggccatgatagccctcaacactgtggtgctgatgatgaagttctatgatgcaccctatgagtacgagctgatgctgaaatgcctgaacatcgtgttcacatccatgttctccatggaatgcgtgctgaagatcatcgcctttggggtgctgaactatttcagagatgcctggaatgtctttgactttgtcactgtgttgggaagtattactgatattttagtaacagagattgcggaaacgaacaatttcatcaacctcagcttcctccgcctctttcgagctgcgcggctgatcaagctgctccgccagggctacaccatccgcatcctgctgtggacctttgtccagtccttcaaggccctgccctacgtgtgtctgctcattgccatgctgttcttcatctacgccatcatcggcatgcaggtgtttgggaatattgccctggatgatgacaccagcatcaaccgccacaacaacttccggacgtttttgcaagccctgatgctgctgttcaggagcgccacgggggaggcctggcacgagatcatgctgtcctgcctgagcaaccaggcctgtgatgagcaggccaatgccaccgagtgtggaagtgactttgcctacttctacttcgtctccttcatcttcctgtgctcctttctgatgttgaacctctttgtggctgtgatcatggacaattttgagtacctcacgcgggactcttccatcctaggtcctcaccacttggatgagttcatccgggtctgggctgaatacgacccggctgcgtgtgggcgcatcagttacaatgacatgtttgagatgctgaaacacatgtccccgcctctggggctggggaagaaatgccctgctcgagttgcttacaagcgcctggttcgcatgaacatgcccatctccaacgaggacatgactgttcacttcacgtccacgctgatggccctcatccggacggcactggagatcaagctggccccagctgggacaaagcagcatcagtgtgacgcggagttgaggaaggagatttccgttgtgtgggccaatctgccccagaagactttggacttgctggtaccaccccataagcctgatgagatgacagtggggaaggtttatgcagctctgatgatattcgacttctacaagcagaacaaaaccaccagagaccagatgcagcaggctcctggaggcctctcccagatgggtcctgtgtccctgttccaccctctgaaggccaccctggagcagacacagccggctgtgctccgaggagcccgggttttccttcgacagaagagttccacctccctcagcaatggcggggccatacaaaaccaagagagtggcatcaaagagtctgtctcctggggcactcaaaggacccaggatgcaccccatgaggccaggccacccctggagcgtggccactccacagagatccctgtggggcggtcaggagcactggctgtggacgttcagatgcagagcataacccggaggggccctgatggggagccccagcctgggctggagagccagggtcgagcggcctccatgccccgccttgcggccgagactcagcccgtcacagatgccagccccatgaagcgctccatctccacgctggcccagcggccccgtgggactcatctttgcagcaccaccccggaccgcccaccccctagccaggcgtcgtcgcaccaccaccaccaccgctgccaccgccgcagggacaggaagcagaggtccctggagaaggggcccagcctgtctgccgatatggatggcgcaccaagcagtgctgtggggccggggctgcccccgggagaggggcctacaggctgccggcgggaacgagagcgccggcaggagcggggccggtcccaggagcggaggcagccctcatcctcctcctcggagaagcagcgcttctactcctgcgaccgctttgggggccgtgagcccccgaagcccaagccctccctcagcagccacccaacgtcgccaacagctggccaggagccgggaccccacccacagggcagtggttccgtgaatgggagccccttgctgtcaacatctggtgctagcacccccggccgcggtgggcggaggcagctcccccagacgcccctgactccccgccccagcatcacctacaagacggccaactcctcacccatccacttcgccggggctcagaccagcctccctgccttctccccaggccggctcagccgtgggctttccgaacacaacgccctgctgcagagagaccccctcagccagcccctggcccctggctctcgaattggctctgacccttacctggggcagcgtctggacagtgaggcctctgtccacgccctgcctgaggacactctcactttcgaggaggctgtggccaccaactcgggccgctcctccaggacttcctacgtgtcctccctgacctcccagtctcaccctctccgccgcgtgcccaacggttaccactgcaccctgggactcagctcgggtggccgagcacggcacagctaccaccaccctgaccaagaccactggtgctagctgcaccgtgaccgctcagacgcctgcatgcagcaggcgtgtgttccagtggatgagttttatcatccacacggggcagccggccctcgggggaggccttgcccaccttggtgaggctcctgtggcccctccctccccctcctcccctcttttactctagacgacgaataaagccctgttagaggatgcggctctctctgtccccttcctgtcctgccttcctgggtctcgtaccacacaccagaccctaaaccgcaggctgctgtgtgtggctgagaaggacccaggagtccaaatcccgtgtcctgggactcagcatccagcatgggtgcttggagccgttgtgaggagctctgcgtcctgtggggagcacccttcacgtggccgtgcggcacagagaagcagggcccacctgaaagtgcgccgagacctcgggacggaggggatggggagggggacacagtcgtggcttgtgcagcccgccagtgtcagcgaatgctcactcaggcaagctctgtcctccctggacaccgtcagccccacaggaaccgagctgggaagtgttcttgctgtggttgtgatttttaattgcaacacctctcattcttgtcacttctatatacgtgatgtagaaaaaatggaaaaccagaaaaatggggaaggaaatgttcacataactttaaaaaatcaaacctgtgaaagaaagatgtcagctttttgccacgtgtctttgtggcttatgcgaggagactccctgtgcagccctgtccggtccaggtggacgtagacggcccctggctctgctgctcttgaccaagtgcctgaccgccaggccctcacacccaggctcctgggcactgtggtgtgaggcgaggcctcgggatccatcaccgcaggatgctgtgaaaagtactcgcgatggcagccaggtagcaagcccttgccagtggagagcactggatgtcatggtggcaaacaaggcagccatttgctgtcctcctcccacgagtggaaggggtttccaaggaagccacagggcagctgaccacgtgcttgtgtgaggcattttcagtctgttctgcatatgattctcagggcacactctgtggtatgtgaaataggtttccttccacatacagcagaagagaggcaaaggctggtaggaaggaggaagacattggctgggggcttggatgtggggccgtcagggcaggagggaggaagccccagctggaatgaaactcagagcaagtgaccgagggaggacacggctcctgccactgaggccgggcacctgatgcccagcactgtcctggcgccagacacagggagcaggcagtcaagtgaggtctgacccccatggccacgctcaggagagaaagaccatgctcaggacactgtccaaggtgcacaagatgctgggaggtcccttgtttggtgaagaaagggagcatttagagcagttgatggtggtgtgtcctccgtgttctgaaattccagatgatctgtgttggattcttggcttctaccccatgattctcctcaaagaaattgtgtgtgatgtgtgtgtgtgtgtgtgtgtgtgtgtgtctgtgtcacaggagatgcagtgcctgtacaggtgtgttcagtgtgtggatgtcattaacccatagggctatgcaacaaaagacacatttaatagaagtaaaacacacaagaccgctgcctggtctcggggttcagcatgattgtgaccaaacctttttatagaatttccttacctgaaggcacaacactctgaaactttaaagataacagagtattttattccaatagaataaaccaggaatctcggactgtgcatgtgatcactgtgctcctgttgcaaagtagaaggatgtgtattttgacactgacgttttgtctcttgttccccagcccccagcccatgttatcttgggtgtcgaatgtgtccattccatgcagaaccacagccatttccccaggcagtgttgggtcgagaatccacttttctaaacccacacagcctagctggcttgtctagactcttctaggcattggaattgatgaaaactacagggagcggggaaaggagacattatgtcttgttttcctgactttgggttttgtttctcactgtgtcttctccggctatcatatatgtcccctgaatctcatagtgagctgccaaatttgaagtgcatcacccagttgtctgcatctggaaccagtcaagcagtggctgtagtttgaacaagttatgtgtgcatgtaacatatatacatatatacatatatacaagtatgtgcatgataatgtatatcttcgtactttttgatacaatgtattcatttgttaatttttaattatatttgatataaatcaaaggtttgttgcaaaactttatatttaagaagtgttaaaaaaaaaaaaaagtcccaaccatgcaacacaactgggacctacttaaaaagaaattctgtgattgactagtttgctgcctgagtcatatttatcagccaaactttggattctgctgttgtttctacaatgacattttgtatgaagcaaagtccttgaattaaaataaaaacttagcaaaaaatcaaaaacaaaacccca

SEQ ID NO: 236 - protein, 2339 aa, Homo sapiens [sequence omitted]

SEQ ID NO: 237 - DNA, 794 bp, Homo sapiens
gtgggatagtagcgtgtccacattgtcctttgagaatgagaagtcatcctggagcacagctcttcccacgctccgggcccacacacccagcctcactccatcaaaggagccccgctgcctgcccacccaccctgggtgctttctggcttgcagtgctcttggcagacatgaggcaacgattgctcccgtccgtcaccagccttctccttgtggccctgctgtttccaggatcgtctcaagccagacatgtgaaccactcagccactgaggctctcggagaactcagggaaagagcccctgggcaaggcacaaacgggtttcagctgctacgccacgcagtgaaacgggacctcttaccaccgcgcaccccaccttaccaagtgcacatctctcaccgggaggctcgaggaccctcatttaggatctgtgtggactttttagggcctagatgggccaggggatgttccaccgggaattagaaataccatctgccatatgcagcaagggatctgcagactttttttctgccattctggtgagaaaaagcgtgacatttgctctgatccctggaataggtgttgcgtatcaaatacagatgaagaaggaaaagagaaaccagagatggatggcagatctgggatctaaaatataagctcccggaaggcagggatgttgaagtatcccaagggcttaaaggaatgtgtggcttatagtaggtgttcaataaatatttgttgaatgaatttagcaccaaaggtgaagagctgataaaagacatttttttaacttcctta

SEQ ID NO: 238 - protein, 103 aa, Homo sapiens
MRQRLLPSVTSLLLVALLFPGSSQARHVNHSATEALGELRERAPGQGTNGFQLLRHAVKRDLLPPRTPPYQVHISHREARGPSFRICVDFLGPRWARGCSTGN

SEQ ID NO: 239 - DNA, 15643 bp, Homo sapiens
aactttaaaaagctgcttcggacaaaccagagccaggatttccactgtcggggacccgggatcggaagggtctagcccgagggaaatgctggaagatcccatcggccagtgaccagcaactttccggcgagattttgacgcggagaactgtgctctgcctcctcttattctcccaaagctcacgttggcgtcctgccttgcgggggaactcggcgcgctctctgcctgagcagcgagtgaattgaaccccagcccgctccggcgcctccgggctgatgagtgtcgctctccgcccgtccatctctttttcccggaggtaaaggcccgcggtcccccaccttcagtgcgcccgggttccaagcgccggagccagcgttttggcggagccgcttcttggatgctgaaggctgggctcctccatcgtgggtgccgaggcggcgatgggtgtcctcaaagtgtggctcgggctggccctagcgttggcggaatttgcagtattgcctcatcattccgaaggtgcttgtgtctatcaggattccttgttggcggatgccacaatttggaagcccgattcatgccagagctgccgttgccatggtgatattgttatctgcaaacctgctgtttgcagaaaccctcaatgtgcctttgagaagggagaagtgcttcaaatagctgccaaccaatgctgtcctgagtgtgttttgaggactccaggatcttgccatcatgaaaagaaaatccatgagcatgggacagaatgggcctcttctccatgtagtgtgtgctcttgcaatcatggggaagtccgatgtaccccccaaccatgcccaccgctgtcatgtggacaccaggagctggcattcatccctgaaggaagctgctgcccagtttgtgtgggccttgggaaaccctgttcctatgaaggccatgtgtttcaggatggggaggactggcggctgagccggtgtgccaaatgtctgtgtagaaatggggttgcccagtgcttcacagctcagtgtcagcctctattttgtaaccaggatgagactgtagtccgagtccctggaaaatgttgcccgcagtgctctgcaagatcctgctctgcagctggccaagtatacgagcatggtgagcagtggagcgaaaatgcctgcaccacgtgtatatgtgaccggggtgaggtcaggtgtcacaagcaggcctgcctgcccctgagatgcggaaagggtcagagcagggctcggcgtcatgggcaatgctgtgaggaatgtgtgtctcctgccgggagctgctcctatgatggagttgtgcggtaccaggacgaaatgtggaagggctcggcctgtgagttctgcatgtgtgatcatggccaagtgacctgccagactggagagtgtgccaaagtggagtgtgcccgggatgaagaattaattcacttagatggaaagtgttgtcctgaatgcatttcaaggaatggttattgtgtttatgaagaaactggagaatttatgtcatcaaatgctagtgaagttaaacgtattccagagggagagaagtgggaagatggcccttgcaaggtgtgtgagtgccgaggggctcaggtaacttgctacgagccctcttgcccaccatgtccagtgggcacactggccttagaggtgaagggacagtgctgtccagactgcacatcagttcattgccatccagattgtttgacatgctctcagtctccagaccactgtgacctctgccaagatcctaccaagttactgcagaatggatggtgtgtgcacagctgtggactgggtttttaccaagctggcagtctctgtttagcctgccagccccagtgctccacgtgtaccagtgggctggagtgctcatcctgccagcctcccctgctgatgcggcacgggcagtgtgtgcctacctgtggggacggcttctaccaagatcgccattcctgtgcagtctgccatgagtcctgtgcaggttgctggggcccaacggagaagcactgcttggcctgcagagatcccctccacgtgctgagagatggcggctgtgagagcagctgtggaaaaggcttctacaacaggcagggcacctgtagcgcttgtgaccaatcctgtgacagttgtggccccagtagccccaggtgtcttacctgtactgagaagacagtgctgcatgatgggaaatgcatgtctgaatgccctggcgggtactatgctgatgccactggcaggtgcaaagtttgtcataactcatgtgccagctgctctgggcccacaccctctcactgtacagcctgcagcccccccaaggctctgcgtcaaggccactgtctgccccgctgtggagagggtttctactctgaccatggagtctgcaaagcctgtcactcctcctgcctggcttgtatgggtcccgcaccctctcactgtactgggtgtaagaagccagaggaaggactgcaagtggagcagctgtctgacgtgggcatcccctctggcgagtgtctagcccagtgtagagcccatttttacttggagagcactggcatatgtgaagcttgccaccagtcctgtttcagatgtgcagggaaaagcccacataactgcacagactgtgggccttcccatgtgctgttggatgggcagtgcctctcccagtgcccagatggctactttcaccaggaaggtagttgcacagagtgtcacccaacctgcaggcagtgtcatgggccgttggagtctgactgcatctcctgttaccctcacatctctcttaccaatggtaactgcaggaccagctgcagggaagagcagttcctcaacctcgtgggatactgtgctgactgccatcacctgtgccagcactgtgcagctgatctccacaacactgggagcatctgcctcaggtgccagaatgcccactacctgctgctcggggaccactgtgttcctgactgcccttcaggatactatgcagagagaggagcttgtaaaaaatgccactcctcctgcagaacctgccagggcagaggacctttctcctgctcctcatgtgacaccaacctcgtgctgtcccacactggcacctgcagcaccacctgcttccctgggcactatcttgatgacaatcatgtttgccagccatgcaacacacactgtggaagctgtgattcacaggccagctgtacctcctgccgagatccaaacaaggttctgctctttggggaatgtcaatacgagagctgcgccccacagtactatcttgacttctccaccaacacgtgcaaagagtgtgattggagctgcagtgcatgcagtgggcccctgaaaacagactgcctgcagtgcatggatggctatgttctccaggatggggcctgcgtggagcagtgcttgtcatcattttaccaggactcgggcctctgcaagaactgtgacagctactgtctccagtgccaaggtccccatgagtgtacccgctgcaaagggccatttctcctcttggaagcccagtgtgtccaggaatgtgggaaggggtactttgcagatcatgcaaagcacaaatgcacagcctgccctcaggggtgcttgcagtgcagccacagggaccgttgtcacctctgtgaccatgggttctttctgaagagtggcctctgtgtttacaactgtgttcctggcttttctgtccacacctctaatgaaacatgttctggcaaaatacacacccctagtcttcatgtgaatggttccctgatcctcccaattggttcaataaagccactggatttttccctcctgaatgtccaagaccaggagggtagggtcgaagatctcctatttcatgttgtgagcactcccaccaatggtcagctagtgctctcaagaaatggaaaagaggttcagctggacaaggctggccgttttagctggaaagatgtgaacgagaagaaagtgcgttttgtgcacagcaaagaaaaactcaggaaaggttaccttttcctgaaaattagtgaccagcagttcttctctgagccacagctgatcaacatacaagcattttcaacacaggccccctatgtgctgagaaatgaagttctccacattagcagaggagagagggcaaccatcaccacccagatgcttgacatccgagatgatgacaacccacaggatgtggtcattgaaataatcgatcctccacttcatggccaattgcttcagacacttcagtccccggcaacccctatctatcaattccagctggatgaactctctagaggccttctccactatgctcatgatggttcagacagcacatccgatgttgcagtcttgcaggccaatgatggacactccttccataatatactgttccaagtgaagaccgtgcctcagaatgacaggggtcttcagcttgtggctaattcgatggtgtgggttccagaaggggggatgctgcagatcaccaacagaatcttacaggccgaggctcctggtgccagtgctgaagaaatcatctacaagattacacaagactacccccagtttggggaggtggtccttctagtgaatatgcctgcagacagccctgcagatgaagggcagcacctgcctgatgggaggacagctacccccaccagcaccttcacccagcaggacatcaatgaaggcatcgtatggtacaggcactcaggagccccagcccagagcgactccttccgcttcgaggtgtccagtgcctccaatgcccagacccgcctggagagccacatgttcaacatcgcgatcttaccacagacacctgaagcacctaaagtgtctctggaagcatctctccatatgactgctagagaagatggcctgactgttattcagcctcattccctctccttcataaactctgagaagccaagtggaaagattgtctacaacatcactctacctctgcatccaaatcaaggtatcatcgagcaccgggaccaccctcactctcctatccggtatttcacgcaagaggatattaaccagggcaaagtcatgtaccgccctcccccggcagcaccccacctccaggagctcatggccttctcgttcgctggtctcccagaatcagtgaaattccacttcacagtttcagatggagaacacacaagtccggagatggtcctcaccattcacttacttcccagtgatcagcaactgccagtgttccaggtcacagctccacggctggcggtcagcccaggaggcagcacttctgtaggacttcaggtggtagtaagagatgctgagacagcgcccaaagaactcttctttgagcttcggagacctccacagcatggtgtgcttcttaagcatacagctgagttccgaaggccgatggccacaggtgacactttcacctatgaggatgttgagaaaaatgctctacagtatatacatgatggttcctctacccgggaagacagcatggagatctcagtcacagatggcctcacagtgacaatgctggaggtgagagtagaggtgtccctgtcagaagaccgagggcctcgactggctgctggctcctctctgagcattactgttgccagtaaaagcacagccataatcactaggtcacaccttgcttacgtggatgattcttcccccgacccagagatctggattcagttaaattatctgccctcatatggtactctcttaagaatctcaggatctgaggtggaagagctctcagaagtttccaatttcacaatggaagacatcaataacaagaaaatcagatactcagctgtgtttgaaactgatggtcatctggttactgatagcttctatttctctgtctctgacatggaccacaaccatctggataatcagatatttaccatcatgatcactcctgctgaaaatccacctccagtcattgcttttgctgaccttatcacggttgatgagggagggagagcaccactctcatttcaccatttttttgctactgatgatgatgacaacctccagagagatgccatcattaaactaagtgctctgcccaaatatggctgcattgagaacacaggaacaggtgatcgttttggccctgaaactgccagtgacctagaggcatcatttcctattcaagacgtcctggaaaactacatttactactttcagagtgttcatgaaagcattgagccaacccatgatatttttagtttttatgtgagtgatggaaccagtcgttcagaaattcacagcatcaatatcaccattgagaggaagaacgatgagcctcccaggatgaccttgcagcccctcagagtgcagctgagctcgggagtggtgataagcaattcttctttgagcctgcaagacctggacaccccagataatgagctcatttttgtattgacaaaaaagcctgaccacggtcatgtactctggaggcaaactgcttctgagcctctggagaatgggagagttttagtccagggctcaaccttcacctaccaggatatcctagctgggctggttgggtatgtgcctagtgtccctggcatggtcgtggatgagttccagttctccctcactgatggcctccacgtggacacagggaggatgaagatctacacagaactgcctgcaagtgacacacctcacttggctataaaccaaggcctacagctctcagcagggtctgtagcacgcatcacagaacagcacttgaaagtgacagatattgactcagatgaccatcaggttatgtacatcatgaaggaagatcctggtgcagggcgcctgcagatgatgaagcatggcaacctggagcaaatttctattaaaggccccatccgaagtttcacccaggcagacattagccaaggccacgtagaatatagtcatggaacaggagaacctggagggagctttgcttttaaatttgatgtggttgatggagaaggcaacagattgattgacaagtcattttccatcagcattctagaagacaaatccccaccagtcatcaccaccaataaaggactggtcttggatgaaaactcagtgaagaaaatcaccaccctgcagctgtctgccactgaccaggacagtgggcctacagaattgatctacagaatcaccagacagccccagctgggccacttggaacatgcagcatcaccaggtatccagattagttcctttactcaagctgatctgacttcacgaaatgttcagtatgtccattctagtgaggctgagaaacattcagatgccttcagctttacactgtctgatggagtcagtgaggtgactcagactttccatatcactcttcaccctgtcgatgattcgctgcccgtcgtacagaacttaggaatgcgggtgcaggagggcatgaggaagaccatcacagagtttgagcttaaggcggtggatgctgacacagaggccgagtctgtcacattcaccatcgtgcagcctccacgccatggcaccatcgagcgaaccagcaatgggcagcatttccacctcacctccaccttcaccatgaaagatatctaccagaaccgggtcagctacagccatgacggcagtaactccctcaaggaccggttcaccttcactgtttctgatgggacaaaccccttctttatcattgaggaagggggaaaagagattatgacagcagcacctcagccgttccgagtagacatcctcccggtagatgatggcacgcctagaattgtcaccaacctgggactccagtggctggaatacatggatggcaaggcaaccaacctgatcaccaagaaggaactgctgaccatggacccagacaccgaggacgcgcagcttgtctatgagataacgacgggccctaagcatggctttgtggagaacaagctgcagcctggcagagctgctgccactttcacccaggaggatgtgaacttggggttgattcgttatgtgttgcacaaggagaagatccgtgagatgatggatagttttcagtttctggtgaaagacagtaaacccaatgtggtcagcgacaatgtcttccatatccagtggtcactcatcagctttaaatataccagctacaatgtcagtgagaaggcagggtctgtcagtgtcacggtgcagaggactgggaacctgaaccaatatgccatcgtcctgtgtcgcaccgagcaaggcaccgccagctccagctccagggtcagctcccaacctgggcaacaggactatgtagagtatgctggccaggtccagtttgatgagcgagaggacaccaagtcctgcaccattgtcatcaacgatgatgacgtgtttgaaaatgttgagagtttcactgtggagctcagcatgccagcttatgccctgttaggggaattcacccaggcgaaggtcattatcaacgataccgaggatgaacccacattagagtttgacaagaagatctactgggttaacgagagcgctggttttctgtttgcacctattgaaagaaaaggagatgcaagcagcattgtatctgcaatttgctacacagtccctaagtcagctatgggaagtagcctctatgctctagaatcaggctctgattttaaatctagagggatgtctgccgcgagtcgtgtgatattcgggcctggtgtgaccatgtccacctgtgatgtcatgcttattgatgacagcgagtatgaagaggaagaagagtttgagattgccttggcagatgcctctgacaatgcccgcattggaagggtggcgacagccaaggtgctcattagtggtcccaacgatgcctcgactgtgtccctgggcaacacggctttcactgtcagtgaggacgcaggcacagtaaagattccagttatccgccatggtactgacctctctactttcgcatctgtctggtgtgcaacgcggccctcagacccagcttctgccacaccaggagttgactacgttcccagctctcggaaggtggaatttgggcctggtgtcattgaacagtattgcaccttgactatcttggatgacactcagtatccggtaattgaaggactggagacatttgtggttttcctcagctcagcacaaggagccgaactgaccaaacccttccaggcagtcattgcaattaatgacacattccaagatgtgcccagcatgcagtttgccaaggatttgctcctagtgaaggagaaggagggtgtcctgcatgtccctatcactcggagcggagacctgagctatgagtcatcagtgaggtgctatactcagagccattccgctcaggtcatggaggactttgaggagagacaaaatgcagactcttcacggattacatttctcaaaggggacaaagtgaagaactgtacggtctatatccacgatgactccatgtttgagccagaggaacagttcagggtctacctcggccttcctcttggaaaccactggagtggagctagaattggaaagaataacatggccaccatcaccatatccaatgatgaagatgcccccaccattgagtttgaagaagctgcataccaagtccgggaacccgcaggcccagatgccattgcgattctgaacatcaaggtgatccgcagaggggatcagaacaggacctccaaggttcgctgcagcacgcgggatggctctgcccagtctggtgtggattattacccaaagagccgagtcttgaagttcagtcccggtgtggatcatatcttttttaaagttgagatcctgtccaatgaagaccgggaatggcatgaatctttctcactagtccttggcccagatgacccagtggaagcagttcttggggatgtgactactgccacggtgacaattctagaccaggaggcagcagggagcctcatattgccagcaccacccattgtggtcacacttgctgactatgaccatgtggaagaagttaccaaggaaggagtcaagaaatccccctccccaggctacccactggtctgtgtcaccccctgcgaccctcatttccccagatacgctgtcatgaaggagcgctgcagtgaggccggcatcaaccagacatctgtgcagttcagctgggaagtggctgcccccactgatggcaatggggcccggtctccctttgaaaccatcactgacaacacaccattcaccagtgtcaaccacatggtcctggacagcatttacttcagccggaggttccatgtgcgttgtgtggccaaggctgtggacaaggtgggccatgtggggacccccttaaggagcaacattgttaccattggaacagacagtgctatctgccacacaccagtggtggctgggacatccagaggcttccaggctcagtccttcatcgcaaccttgaaatacctggatgtcaaacataaggagcatccgaacagaatccacatttcggtgcagatcccacaccaggatggaatgctgccccttatctccaccatgccgttgcacaacttacattttctactgtctgagtccatctacagacaccagcacgtctgctccaatttagttaccacctatgacctgagaggcatctcagaggcagggttcctggatgatgtggtctatgatagcactgccctggggcctggctacgatcgccccttccagtttgaccccagcgtgcgagagccgaagaccatccagctctacaaacacctgaacctgaagagctgcgtgtggacctttgatgcttattatgacatgactgagctgattgacgtctgtgggggctctgtaaccgctgacttccaggtgagggactctgcccagtccttcttgacagtgcacgtgcctctatatgtgtcctacatctatgtgacagcccccaggggctgggcctccttggagcaccacaccgagatggagttttctttcttctatgacactgttctctggagaacaggaatccagacagacagcgtgctctctgcaaggcttcagataataagaatctacattcgagaggatggccgtcttgtcattgaattcaagacccatgccaaattcagaggacagtttgtgatggagcatcacactctcccagaagtgaaatctttcgtattgactccagaccacctaggaggaattgaatttgacttgcagctattatggagcgctcagacttttgattctccacatcaactctggagagccacaagctcttataacaggaaggactactcaggagagtacaccatctacctgatcccttgcacagtgcagcccacacagccatgggttgacccaggagagaagcctttggcctgcactgcacatgccccagaaagattcctgatacccattgcattccagcagaccaaccgccctgtgccagttgtgtattcacttaacactgaatttcagctctgcaataatgagaaggtgttcctaatggatcccaatacatctgatatgtcactagcagaaatggattacaaaggagccttttcaaaaggtcaaatcctttatggccgagtactttggaatccagaacaaaatcttaattctgcttacaaactccagctggagaaagtctatctttgtacgggcaaggatggttatgtgcctttctttgatcccacggggacaatctacaatgaagggccccagtatggatgcattcagccaaacaaacacctaaaacacagattcctgctgttggaccgcaatcagccagaggtaactgataagtacttccatgatgtgccttttgaggctcactttgcctctgagttgcctgatttccatgtggtcagtaacatgccaggtgtggatggatttactctaaaagtagatgcactctataaggtggaagcaggacaccagtggtatctccaggtcatctacatcattggccctgacaccatctcagggccccgggtccagcgctctctcacagctccactcagacgcaaccgaagggacctggtagagcccgatggccagctgatccttgatgattccctcatctatgacaatgaaggagaccaagtcaagaatggcaccaatatgaagtccctgaatctggagatgcaagagttggcggtagctgcgtccctgtcacagactggggcgtccattggcagtgccctggctgcaatcatgcttctacttctggtgtttttggtggcttgttttatcaacaggaaatgccagaaacagaggaagaagaagcccgcagaggacattttggaagaatatcctctgaataccaaggtagaagtgcccaagaggcacccggaccgggtggagaagaacgtgaatagacactactgcactgtgcggaacgtcaacatcctgagtgagcctgaggcggcttacacgttcaaaggtgctaaagtcaaaagactgaatctagaagtcagagttcacaacaatttacaagatggaacagaagtttaatggaggagacctatgtgtatttttttctaaaatcatttttataaaatggggggaaatactggtatttttataatctcgcagataaaaaagggaaaactatagctttgagtggcagacagcacacatcacatgcatcaactcacaactgagctacctcattcagcaaagaaccactgagaaccccagagtattacagttatttccgtagatccctttaatagtgtcaacaactgtacacagctccttctgtaaggctggtcttagaaaacaagtactttagtatcaggacaggagttgaacaattaggttagcagatggagatgagaggactgggtagagtaccatggcagatctcagagagaagaagtaggtacgggcctttggttccctcccccagccccagctttctcctacagggcttttcctgagtccccagacagcagagtatgaactgctgacacccagattccattaaaaattctgctaatcgacacaacacatatatttgctcatgatttcacttgacagcgtatgctccttggcctctaattgtactttgcttttccagagccctttttacctggggatttcagtgtgcttaagtaaaatcctctgaaaaccacgggagcctctgcctcctcagccacagagaactccctcctacaaagggggagactgaaacccgagttaaggaggggcctggcaggcgtatcagagcacattagtgatgcccttcaccccagggaggtgtctgttcccaactagtttatgtggcactgagacatccatccctgaccaaggatgctgcgaaacaggatcaatgtactacggccttttaattcaacattgccataaatgctttaaagaaaacccaccacactttcctcctactccggtctttgcccgttcctgtaacagacaatcccatgtcctaggtatggttttttattctgttagtgcttcgggaaagtaagtgattcatttgaataaggcaaattaggagaaagcccaggttggggtgaaatcagacttaacagatacatgctggttctccttgctgtgtgtgacacagcagacagaggcactattcctggtgcagtatttcagggatttctctttgaggggttcttttctggtagctcaggcaattatttttaccatatcagcacatgacaaggccatgaacacatggctctaaaataatttagtgttcaagtatcagcttaactattttgtgtaggctacacacagcttgcttttgtttctcttctgtttctgccttattggcggaaacataagcgtgcatgccatgttgttttgaattggaggcacaatttcattattcgagagtaaaagacatgtcctcttctgatgcatggcacaccatagtcaccaagcaaataacagagccttcacattgtgtaatatttgtatgagaatgactcaagctctttgagaacattccaaactagtaacatttcgctactaaaagctagaaaggatgaactgtgaaaggttctaggcagctctgtgagactccaagctccttgaaagtaggacctttgtgagccacgcctttcattcttcaacagtgccttgcatgtaacaagcactccagaaatgtttgttgaatgaatgaatggtgtcatgggtgaatgatggggagtaaatttaggaaggggaagtgagagagtatggtggcaatatcacaagggaggagagaggaaaacaattatcttctctacttggattatgagataaccttttcttggaggaaagaaacaccgctttacaaaggcatgactctggcggtggtcctaaggaagcatgagcagaaaattcataaaaatgtatcatcagcaggagatgagactatgaattggcatccagaacaggagatttagagcaaaatctaatttagcattctgagatgagtgtcaggttttcaggagagaatgagttggggtgagcccagagtctgaaactcctgactggtcaggtgctacttaagaccagcttgggcaattcagggcagaactcctgtatcagcctcatggacacccagaattggtatctcatggctggagagctgatcagccaggcacagaatctccagaacaacctagagagtgaatgctaatttgtagagcgaacttccatttggcccattatttgtaactgtgtaactgctccaagtgccagaatgcttacacgttaaagcagcacctttccatttgcccacatattcttcttgcacaccccttccattactgctgaataggacattgcatgggaagagtacagaggtggcagaatgaagctagagtgggaaggactaaagactgagccccagagtgctcccagcaaccgccacgtacaaggtctgaaatgacaagggcaagagtgagataggaaactgtgtgtgaaaggaaagcccttgcagtatttctgcctccctttctttctgcctttcaccccactaaatgtatgttattgaatgccagtacttctctagtggatgcacacttgttaaatagtgttaagagatgtggagatgagatatacccctttgatgtagaattattcatttggtttgtttcatacttcattataggaatcaagtaatttgatgactaatgtggattatatttcagtcaaagctctgctttcaatttctctgatttgctcactaatgccttgtgtgtgttttactaaccttttatatcttgccttcaagtgagaaggaacaaacaactctcagtggttactacttgcttttatatgctggctgtgaaggttaaaagaaagaatggtctgtaccattctgctttgctgcccttttattgtaccccaggcctcctagaggactcctgcagattctattgttgggtgggaaatagtgttggaatgtgtttgcacagtcttatgatattcagtctcagtctgctataggtatttgttattcttggatactacacacctgctcagactgagtaaacatttgtggtgctgtcaacctgatttcttgactctcaaatgatttttgtatttccaatatgaatttgtgtgttatgaatttctgatttctccaatagtatatgccactatataaatttgtattaataaatgacagtcttgttggtttaaaaaaaaaaaaaaaaaaa

SEQ ID NO: 240 - protein, 4012 aa, Homo sapiens
MGVLKVWLGLALALAEFAVLPHHSEGACVYQDSLLADATIWKPDSCQSCRCHGDIVICKPAVCRNPQCAFEKGEVLQIAANQCCPECVLRTPGSCHHEKKIHEHGTEWASSPCSVCSCNHGEVRCTPQPCPPLSCGHQELAFIPEGSCCPVCVGLGKPCSYEGHVFQDGEDWRLSRCAKCLCRNGVAQCFTAQCQPLFCNQDETVVRVPGKCCPQCSARSCSAAGQVYEHGEQWSENACTTCICDRGEVRCHKQACLPLRCGKGQSRARRHGQCCEECVSPAGSCSYDGVVRYQDEMWKGSACEFCMCDHGQVTCQTGECAKVECARDEELIHLDGKCCPECISRNGYCVYEETGEFMSSNASEVKRIPEGEKWEDGPCKVCECRGAQVTCYEPSCPPCPVGTLALEVKGQCCPDCTSVHCHPDCLTCSQSPDHCDLCQDPTKLLQNGWCVHSCGLGFYQAGSLCLACQPQCSTCTSGLECSSCQPPLLMRHGQCVPTCGDGFYQDRHSCAVCHESCAGCWGPTEKHCLACRDPLHVLRDGGCESSCGKGFYNRQGTCSACDQSCDSCGPSSPRCLTCTEKTVLHDGKCMSECPGGYYADATGRCKVCHNSCASCSGPTPSHCTACSPPKALRQGHCLPRCGEGFYSDHGVCKACHSSCLACMGPAPSHCTGCKKPEEGLQVEQLSDVGIPSGECLAQCRAHFYLESTGICEACHQSCFRCAGKSPHNCTDCGPSHVLLDGQCLSQCPDGYFHQEGSCTECHPTCRQCHGPLESDCISCYPHISLTNGNCRTSCREEQFLNLVGYCADCHHLCQHCAADLHNTGSICLRCQNAHYLLLGDHCVPDCPSGYYAERGACKKCHSSCRTCQGRGPFSCSSCDTNLVLSHTGTCSTTCFPGHYLDDNHVCQPCNTHCGSCDSQASCTSCRDPNKVLLFGECQYESCAPQYYLDFSTNTCKECDWSCSACSGPLKTDCLQCMDGYVLQDGACVEQCLSSFYQDSGLCKNCDSYCLQCQGPHECTRCKGPFLLLEAQCVQECGKGYFADHAKHKCTACPQGCLQCSHRDRCHLCDHGFFLKSGLCVYNCVPGFSVHTSNETCSGKIHTPSLHVNGSLILPIGSIKPLDFSLLNVQDQEGRVEDLLFHVVSTPTNGQLVLSRNGKEVQLDKAGRFSWKDVNEKKVRFVHSKEKLRKGYLFLKISDQQFFSEPQLINIQAFSTQAPYVLRNEVLHISRGERATITTQMLDIRDDDNPQDVVIEIIDPPLHGQLLQTLQSPATPIYQFQLDELSRGLLHYAHDGSDSTSDVAVLQANDGHSFHNILFQVKTVPQNDRGLQLVANSMVWVPEGGMLQITNRILQAEAPGASAEEIIYKITQDYPQFGEVVLLVNMPADSPADEGQHLPDGRTATPTSTFTQQDINEGIVWYRHSGAPAQSDSFRFEVSSASNAQTRLESHMFNIAILPQTPEAPKVSLEASLHMTAREDGLTVIQPHSLSFINSEKPSGKIVYNITLPLHPNQGIIEHRDHPHSPIRYFTQEDINQGKVMYRPPPAAPHLQELMAFSFAGLPESVKFHFTVSDGEHTSPEMVLTIHLLPSDQQLPVFQVTAPRLAVSPGGSTSVGLQVVVRDAETAPKELFFELRRPPQHGVLLKHTAEFRRPMATGDTFTYEDVEKNALQYIHDGSSTREDSMEISVTDGLTVTMLEVRVEVSLSEDRGPRLAAGSSLSITVASKSTAIITRSHLAYVDDSSPDPEIWIQLNYLPSYGTLLRISGSEVEELSEVSNFTMEDINNKKIRYSAVFETDGHLVTDSFYFSVSDMDHNHLDNQIFTIMITPAENPPPVIAFADLITVDEGGRAPLSFHHFFATDDDDNLQRDAIIKLSALPKYGCIENTGTGDRFGPETASDLEASFPIQDVLENYIYYFQSVHESIEPTHDIFSFYVSDGTSRSEIHSINITIERKNDEPPRMTLQPLRVQLSSGVVISNSSLSLQDLDTPDNELIFVLTKKPDHGHVLWRQTASEPLENGRVLVQGSTFTYQDILAGLVGYVPSVPGMVVDEFQFSLTDGLHVDTGRMKIYTELPASDTPHLAINQGLQLSAGSVARITEQHLKVTDIDSDDHQVMYIMKEDPGAGRLQMMKHGNLEQISIKGPIRSFTQADISQGHVEYSHGTGEPGGSFAFKFDVVDGEGNRLIDKSFSISILEDKSPPVITTNKGLVLDENSVKKITTLQLSATDQDSGPTELIYRITRQPQLGHLEHAASPGIQISSFTQADLTSRNVQYVHSSEAEKHSDAFSFTLSDGVSEVTQTFHITLHPVDDSLPVVQNLGMRVQEGMRKTITEFELKAVDADTEAESVTFTIVQPPRHGTIERTSNGQHFHLTSTFTMKDIYQNRVSYSHDGSNSLKDRFTFTVSDGTNPFFIIEEGGKEIMTAAPQPFRVDILPVDDGTPRIVTNLGLQWLEYMDGKATNLITKKELLTMDPDTEDAQLVYEITTGPKHGFVENKLQPGRAAATFTQEDVNLGLIRYVLHKEKIREMMDSFQFLVKDSKPNVVSDNVFHIQWSLISFKYTSYNVSEKAGSVSVTVQRTGNLNQYAIVLCRTEQGTASSSSRVSSQPGQQDYVEYAGQVQFDEREDTKSCTIVINDDDVFENVESFTVELSMPAYALLGEFTQAKVIINDTEDEPTLEFDKKIYWVNESAGFLFAPIERKGDASSIVSAICYTVPKSAMGSSLYALESGSDFKSRGMSAASRVIFGPGVTMSTCDVMLIDDSEYEEEEEFEIALADASDNARIGRVATAKVLISGPNDASTVSLGNTAFTVSEDAGTVKIPVIRHGTDLSTFASVWCATRPSDPASATPGVDYVPSSRKVEFGPGVIEQYCTLTILDDTQYPVIEGLETFVVFLSSAQGAELTKPFQAVIAINDTFQDVPSMQFAKDLLLVKEKEGVLHVPITRSGDLSYESSVRCYTQSHSAQVMEDFEERQNADSSRITFLKGDKVKNCTVYIHDDSMFEPEEQFRVYLGLPLGNHWSGARIGKNNMATITISNDEDAPTIEFEEAAYQVREPAGPDAIAILNIKVIRRGDQNRTSKVRCSTRDGSAQSGVDYYPKSRVLKFSPGVDHIFFKVEILSNEDREWHESFSLVLGPDDPVEAVLGDVTTATVTILDQEAAGSLILPAPPIVVTLADYDHVEEVTKEGVKKSPSPGYPLVCVTPCDPHFPRYAVMKERCSEAGINQTSVQFSWEVAAPTDGNGARSPFETITDNTPFTSVNHMVLDSIYFSRRFHVRCVAKAVDKVGHVGTPLRSNIVTIGTDSAICHTPVVAGTSRGFQAQSFIATLKYLDVKHKEHPNRIHISVQIPHQDGMLPLISTMPLHNLHFLLSESIYRHQHVCSNLVTTYDLRGISEAGFLDDVVYDSTALGPGYDRPFQFDPSVREPKTIQLYKHLNLKSCVWTFDAYYDMTELIDVCGGSVTADFQVRDSAQSFLTVHVPLYVSYIYVTAPRGWASLEHHTEMEFSFFYDTVLWRTGIQTDSVLSARLQIIRIYIREDGRLVIEFKTHAKFRGQFVMEHHTLPEVKSFVLTPDHLGGIEFDLQLLWSAQTFDSPHQLWRATSSYNRKDYSGEYTIYLIPCTVQPTQPWVDPGEKPLACTAHAPERFLIPIAFQQTNRPVPVVYSLNTEFQLCNNEKVFLMDPNTSDMSLAEMDYKGAFSKGQILYGRVLWNPEQNLNSAYKLQLEKVYLCTGKDGYVPFFDPTGTIYNEGPQYGCIQPNKHLKHRFLLLDRNQPEVTDKYFHDVPFEAHFASELPDFHVVSNMPGVDGFTLKVDALYKVEAGHQWYLQVIYIIGPDTISGPRVQRSLTAPLRRNRRDLVEPDGQLILDDSLIYDNEGDQVKNGTNMKSLNLEMQELAVAASLSQTGASIGSALAAIMLLLLVFLVACFINRKCQKQRKKKPAEDILEEYPLNTKVEVPKRHPDRVEKNVNRHYCTVRNVNILSEPEAAYTFKGAKVKRLNLEVRVHNNLQDGTEV

SEQ ID NO: 241 - DNA, 2765 bp, Homo sapiens
ccgaggggttccttggagaaggtggtgcgtcctggggcggcagctgaggaagaaagacgcagtgccccgaagcccctgagctgaaaagggccagaaagggggcggcatggcatggcccaaactgcccgcaccttggctgctgctctgcacctggctcccagcagggtgcctgtccttgcttgtgacggtccagcacacagaacgctatgtcaccctgtttgcctctatcatcctcaaatgtgactacaccacctctgcccagctccaggacgtggtggtgacatggcgcttcaagtccttctgcaaggaccctatctttgactactactcagcgtcataccaggcagctttatccctgggccaggacccatccaatgactgcaacgacaaccagcgggaagttcgcatagtggcccagcggcgggggcagaatgagcccgtgctgggggtagattaccggcagcgcaagatcaccatccagaaccgagcagatctcgtgataaatgaagtgatgtggtgggaccatggagtgtattactgcaccattgaggctccaggggacacatcaggagaccccgataaggaagtaaagctcatcgtcctacactggctgacagtgatcttcatcatcctgggagccctcctcctcctgctgctgattggagtgtgctggtgccagtgctgtcctcagtattgctgctgctatatccgctgtccctgctgtcctgcccactgctgctgtcctgaggaagatttgtccctgccgtccagcctcccgcagatgccaatgacccagaccaccaatcagcctcccatcgccaatggtgtcctggagtatttggagaaagaactgcggaacctcaacctggcccagcctctgccccctgacctcaaaggcagatttggccatccctgcagcatgctgtcctccctgggctctgaggtcgtggaacgcagaatcatccacctgcccccactgatcagagacctgtcatcctcaaggaggaccagtgactccctgcaccagcagtggctcaccccaattccctccaggccctgggatctgagggaggggagaagccaccaccattaccctgatttccaccaggagctccaggaccgggggccaaagtcttgggcattggaaagaagggagttggacccatcgtggagtggaaggcaccgtagctctaggctgaatgggtcacccatacactggtcagacagggacagcctaagcgatgtcccctcatccagtgaggcacgctggcggccgagccaccctcctttcaggagccgctgtcaggagaggccccgcaggcccagcccccgggagagcactcagaggcacgggagacgacgcaggcaccgcagctactctcctcccttgccctccggcctcagttcctggagctctgaagaggacaaggagaggcagccccagagctggcgggcccaccgccgcggctcgcactccccacactggcccgaggagaagccgcctagctaccgctcactggatatcactccaggcaagaatagcaggaaaaaagggagtgtggagaggcgctcggagaaagacagctctcatagtggaaggagtgtggtcatttagtcaccaagcacagcacaacttctgtggctacttctcggctcctgtgtgtcatcagcatcacctaggtttccagctgacttgggaactgcaagtctgagtctaacagtttttggcttagattctgagaatcaaatagaagaattttaaatacaagagtttgagattgggtatagtggctcacacctgtaatcacagcactttgggaggctaagaatcacttgagactaggagttcaagatcagcctgggaaacatagtgagaccccgtctctacaaaaaatataaaaattagttaggtgtggtggcatgcacttgtagtcccagctactcaagaggctgaggcagaaggatcccttgagcccaggagtgcaaggctgcaatgagccaggatcccatgatcacacatctgtattccagcctgggcaatagagcaagtccccattactaaaaaacccaaaaggccaaaaaacaaaaaagttagagttcgaggaattaccaactgtagttttagccttggttcatgctctcttgcatatttatataatctctgacttgtaatggaccctgactggaatgtgatccctcaggaacttagtagcctgagtctttcagtagactacactgcccagaaccctggccattctcaaaatgagaacttgggaatgtttaagaagaaatcaaacatgtttcaggaaaaggaaatctatggagtattatagggacattcccatgggaatgtatcttcctccatggcatgtcttgagggtcctttcttgttaggagtttatcctgccagcccataaatggactatttattgtaagtgtagaaaatcacagagaagcagttttgcaccagccttattcctgtgccttgttttcctcttgctctttttttacctgtatatctaatttatattttcatatatattgtgtattgattgaagtcactttaaatccttcttgggaatgacacagtatataaataaggaagaaagaaaacatgccaagctgagcatgctgctccaaataaatatctgctttcctaaaaaaaaaaaaaaaaaaaaaaaaaaaaaaaaaaaaaaaaaaaaaaaaaaaaaaaaaaaaaaaaaaaaaaaaaaaaaaaaaaaaaaaaaaaaaaaaaaaaaaaaaaa

SEQ ID NO: 242 - protein, 502 aa, Homo sapiens
MAWPKLPAPWLLLCTWLPAGCLSLLVTVQHTERYVTLFASIILKCDYTTSAQLQDVVVTWRFKSFCKDPIFDYYSASYQAALSLGQDPSNDCNDNQREVRIVAQRRGQNEPVLGVDYRQRKITIQNRADLVINEVMWWDHGVYYCTIEAPGDTSGDPDKEVKLIVLHWLTVIFIILGALLLLLLIGVCWCQCCPQYCCCYIRCPCCPAHCCCPEEDLSLPSSLPQMPMTQTTNQPPIANGVLEYLEKELRNLNLAQPLPPDLKGRFGHPCSMLSSLGSEVVERRIIHLPPLIRDLSSSRRTSDSLHQQWLTPIPSRPWDLREGRSHHHYPDFHQELQDRGPKSWALERRELDPSWSGRHRSSRLNGSPIHWSDRDSLSDVPSSSEARWRPSHPPFRSRCQERPRRPSPRESTQRHGRRRRHRSYSPPLPSGLSSWSSEEDKERQPQSWRAHRRGSHSPHWPEEKPPSYRSLDITPGKNSRKKGSVERRSEKDSSHSGRSVVI

SEQ ID NO: 243 - DNA, 6276 bp, Homo sapiens
agtcggcatccatcagcgggcgggggtgtcgccgaacaggctgctccgcagagcccgccgcgaccccgcgccgccccgccccgcggcctgcctgccagaggagccgagggggccgcccctcgcccaacctgcccgacatggggaaccccgggcccaggcgtgctggtcaccatgacaacagagacaggccccgactctgaggtgaagaaagctcaggaggaggccccgcagcagcccgaggctgctgccgctgtgaccacccctgtgacccctgcaggccacggccacccagaggccaactccaatgagaagcatccatcccagcaggacacgcggcctgctgaacagagcctagacatggaggagaaggactacagtgaggccgatggcctttcggagaggaccacgcccagcaaggcccagaaatcgccccagaagattgccaagaaatacaagagtgccatctgccgggtcactctgcttgatgcctcggagtatgagtgtgaggtggagaaacatggccggggccaggtgctgtttgacctggtctgtgaacacctcaacctcctagagaaggactacttcggcctgaccttctgtgatgctgacagccagaagaactggctggacccctccaaggagatcaagaagcagatccggagtagcccctggaattttgccttcacagtcaagttctacccgcctgatcctgcccagctgacagaagacatcacaagatactacctgtgcctgcagctgcgggcagacatcatcacgggccggctgccatgctcctttgtcacgcatgccctactgggctcctacgctgtgcaggctgagctgggtgactatgatgctgaggagcatgtgggcaactatgtcagcgagctccgcttcgcccctaaccagacccgggagctggaggagaggatcatggagctgcataagacatatagggggatgaccccgggagaagcagaaatccacttcttagagaatgccaagaagctttccatgtacggagtagacctgcaccatgccaaggactctgagggcatcgacatcatgttaggcgtttgtgccaatggcctgctcatctaccgggaccggctgagaatcaaccgctttgcctggcccaagatcctcaagatctcctacaagaggagtaacttctatatcaagatccggcctggggagtatgagcaatttgagagcacaattggctttaagctcccaaaccaccggtcagccaagagactgtggaaggtctgcatcgagcatcatacattcttccggctggtgtcccctgagcccccacccaagggcttcctggtgatgggctccaagttccggtacagtgggaggacccaggcacagactcgccaggccagcgccctcattgaccggcctgcacccttctttgagcgttcttccagcaaacggtacaccatgtcccgcagccttgatggagcagagttctcccgcccagcctcggtcagcgagaaccatgatgcagggcctgacggtgacaagcgggatgaggatggcgagtctggggggcaacggtcagaggctgaggagggagaggtcaggactccaaccaagatcaaggagctaaagccggagcaggaaaccacgccgagacacaagcaggagttcttagacaagccagaagatgtcttgctgaagcaccaggccagcatcaatgagctcaaaaggaccctgaaggagcccaacagcaaactcatccaccgggatcgagactgggaacgggagcgcaggctgccctcctcccccgcctccccctcccccaagggcacccctgagaaagccaatgagagagcagggctgagggagggctccgaggagaaagtcaaaccaccacgtccccgggccccagagagtgacacaggcgatgaggaccaggaccaggagagggacacggtgttcctgaaggacaaccacctggccattgagcgcaagtgctccagcatcacggtcagctctacgtctagcctggaggctgaggtggacttcacggtcattggtgactaccatggcagcgccttcgaagacttctcccgcagcctgcctgagctcgaccgggacaaaagcgactcggacactgagggcctgctgttctcccgggatctcaacaagggggcccccagccaggatgatgagtctgggggcattgaggacagcccggatcgaggggcctgctccaccccggatatgccccagtttgagcccgtgaaaacagaaaccatgactgtcagcagtctggccattagaaagaagattgagccggaggccgtactgcagaccagagtctccgctatggataacacccagcaggttgatgggagtgcctcagtggggagggagttcatagcaaccactccctccatcaccacggagaccatatcgaccaccatggagaacagtctcaagtccgggaagggggcagctgccatgatcccaggcccacagacggtggccacggaaatccgttctctttctccgatcatcgggaaagatgtcctcaccagcacctacggcgccactgcggaaaccctctcaacctccaccaccacccatgtcaccaaaactgtgaaaggagggttttctgagacaaggatcgagaagcgaatcatcattactggggatgaagatgtcgatcaagaccaggccctggctttggccatcaaggaggccaaactgcagcatcctgatatgctggtaaccaaagctgtcgtatacagagaaacagacccatccccagaggagagggacaagaagccacaggaatcctgacctctgtgaagagatcctggcatttctggtccaacccaagccagagaaccattaagaaggggccttcattctggattctccgacgcaacactgacgtcccagctgcgacgtactgtcactgatgagagactgggaagggaaaagcatatatatatagatatatagagatatagatatatatacaggaaacaccgcatccttgcactgctgctggggctggcagagcagttggctgacagcaacaaccgacatctgaacacctacatttcctttgcagacaaattgaagaactggtgggatttttttcaagaaaaaaaattatataataactataatcccttgctcacccctttcccccgccaaataagaaacgcaagccagaccacgatgattgtagaagtccctcccgccctggttctgcacgttacagttagcagacgagcaattccatttgttcttctccagcatctctaaggcccacttgaatgcaaaggaaaacacttgcacagcaaagcaagagaagtcacagcagcaagacacgcacagtcaaccattttccgagaaaaaaagaaaattccccacttggaaagaaagaggaggaacactggattcttactttctggatcttgacactgggctgcaaaacctaccttcctctctcccgcctcccctcaccctcaactctcaatgtcttgctgtcattttctgtctcggctccctcctcccccttcccccttcccccaccccacacccttcaccctctgtgtcctggtccttctgagggccactgcagatgactctcctttgaaatgagaaaaagaaaagaaagcaagaacagaaaacgaagccacaggaagggaagtagacattgtatgcttatggtttctcattatgaaggtgcagcttgtaggaggtttgtacggatgtgctttgaagttatgtatattacatataacaggaaaaaatattaaaataaacagtgctggtaagtatgaagctgacattctaaaattataattatctgactgtgattgatgtatcctgaggttcctagatctcactgaactggcccagctaaggagacctggactctgggtgtgggttggctcacagtaggggctgacgggttcagtgtagtaatactgtgtgtggtgtttgtaattggttgattggtggggaggggtggggggccctaatggagaggtgtgggtttggcaagaaagaagcaacacagatgtcgtccccaaaatgccagttcaagacaccttctccctgcccccctggtagtaacagtcagggcctggtctgtgctcaggtactgggtcccagtctgggactctgctgctgaagttgccacagtagaggtccctggcttagtccttatctccctacggggcttgccttggttttcagtcttctctctctttctctcttttttttttttttgccacattctgcccttccctgaccccattgtaataaccaactccatatccaaagggaggtggtgctctcagccattgtagaagatggtggctttaacctgactgtctaaaaattcccagctaagccttttcctctactctcttccttgttctgaatcatttcttcttctcaggccaaagtagccatggtaaggaggcttcatggggcagaccctgaaagatcaaaactgcatttgcaaagccctcccctgtcccaggacaaagctgagactgacgggtgatgttgctcataggctccagctctgcataagaccttggcttggagacctccctctcagtcaacagctgaactctgagcttgtgcccagaaattaccccaagaccacaggaacccttcaagaagctcccatcacaagcttggcattgctctctgccacacgtgggcttcctcaggcttgtctgccacaagctacttctctgagctcagaaagtgccccttgatgagggaaaatgtcccactgcactgcgaatttctcagttccattttacctcccagtcctccttctaaaccagttaataaattcattccacaagtatttactgattacctgcttgtgccagggactattctcaggctgaagaaggtgggaggggagggcggaacctgaggagccacctgagccagctttatatttcaaccatggctggcccatctgagagcatctccccactctcgccaacctatcggggcatagcccagggatgcccccaggcggcccaggttagatgcgtccctttggcttgtcagtgatgacatacaccttagctgcttagctggtgctggcctgaggcagggcaggaaatcagaatagcatttgcttctctgggcaaatgggaagttcagcggggcagcagaatcagtggcattccccctggtgcaggccggtgggtccactccaactccccctgagtgtagcagcacactttccatacaccaggttctttctacaatcctggtggaaaagccacagaaccttcttcctgcccttcttgagagttccccctctttctgggtcaagagctggagtggtggctccatcctctctgggccacttcggtctaggaactcatctttgcaggaaccaggagtcctgagcacactgaacacacctcagagggaggatccttgttgtggattttgcacctggctttggggcaggggtgaagtgaccaggcttagcttgtggagtttatgggccaccagggtttggggaaatcaccatcccgcggatgctgtgacctcccttctacggagatgcaggcagtgccacgagggaggaggggacctgcaaagctagaatctagggcactgtttcctccccatccttctctttgtagagaatagagacgtttgtcttgtctgtcttcaacctacttttccttttctcttttttgtttctcatcctctctgtgccacctctccacccaggaggccatgtagcatagtggaaaaagtccctgagggcggttaggagttctgggtgaccatcctggctcagctcctaactcaccatgtgacatcaggctatccccattccccctcttgggcctcagtttcccgacttgcaaaataagcagaaagaaccagatgctctccagggtctttttctactttgctatctcatgggtcttcattttctcttattttgttttctctggatcttttccatctgagggtacaggaagtaccaggacctgtttcagtttttgaatcctgcaagcacattccaagactggcctgaaactgcatgagcaacatcactcgaaataattttttttttcaaaagcaccttaacaaccaattgcgatgctgtcctgttcctttttactcacacccttctctcctttctcgtccccatgctcccccacctcagtgctccgtgctgtatgcgtgtgctctctgttcttgtatactcaatataagtgaaataaatgtgtttgatgctgaaccata

SEQ ID NO: 244 - protein, 881 aa, Homo sapiens
MTTETGPDSEVKKAQEEAPQQPEAAAAVTTPVTPAGHGHPEANSNEKHPSQQDTRPAEQSLDMEEKDYSEADGLSERTTPSKAQKSPQKIAKKYKSAICRVTLLDASEYECEVEKHGRGQVLFDLVCEHLNLLEKDYFGLTFCDADSQKNWLDPSKEIKKQIRSSPWNFAFTVKFYPPDPAQLTEDITRYYLCLQLRADIITGRLPCSFVTHALLGSYAVQAELGDYDAEEHVGNYVSELRFAPNQTRELEERIMELHKTYRGMTPGEAEIHFLENAKKLSMYGVDLHHAKDSEGIDIMLGVCANGLLIYRDRLRINRFAWPKILKISYKRSNFYIKIRPGEYEQFESTIGFKLPNHRSAKRLWKVCIEHHTFFRLVSPEPPPKGFLVMGSKFRYSGRTQAQTRQASALIDRPAPFFERSSSKRYTMSRSLDGAEFSRPASVSENHDAGPDGDKRDEDGESGGQRSEAEEGEVRTPTKIKELKPEQETTPRHKQEFLDKPEDVLLKHQASINELKRTLKEPNSKLIHRDRDWERERRLPSSPASPSPKGTPEKANERAGLREGSEEKVKPPRPRAPESDTGDEDQDQERDTVFLKDNHLAIERKCSSITVSSTSSLEAEVDFTVIGDYHGSAFEDFSRSLPELDRDKSDSDTEGLLFSRDLNKGAPSQDDESGGIEDSPDRGACSTPDMPQFEPVKTETMTVSSLAIRKKIEPEAVLQTRVSAMDNTQQVDGSASVGREFIATTPSITTETISTTMENSLKSGKGAAAMIPGPQTVATEIRSLSPIIGKDVLTSTYGATAETLSTSTTTHVTKTVKGGFSETRIEKRIIITGDEDVDQDQALALAIKEAKLQHPDMLVTKAVVYRETDPSPEERDKKPQES

SEQ ID NO: 245 - DNA, 1004 bp, Homo sapiens
cgccaatttagggtctccggtatctcccgctgagctgctctgttcccggcttagaggaccaggagaagggggagctggaggctggagcctgtaacaccgtggctcgtctcactctggatggtggtggcaacagagatggcagcgcagctggagtgttaggagggcggcctgagcggtaggagtggggctggagcagtaagatggcggccagagcggtttttctggcattgtctgcccagctgctccaagccaggctgatgaaggaggagtcccctgtggtgagctggaggttggagcctgaagacggcacagctctgtgcttcatcttctgaggttgtggcagccacggtgatggagacggcagctcaacaggagcaataggaggagatggagtttcactgtgtcagccaggatggtctcgatctcctgacctcgtgatccgcccgccttggccttccaaagtgccgagattacagcgatgtgcattttgtaagcactttggagccactatcaaatgctgtgaagagaaatgtacccagatgtatcattatccttgtgctgcaggagccggctcctttcaggatttcagtcacatcttcctgctttgtccagaacacattgaccaagctcctgaaagatgtaagtttactacgcatagacttttaaacttcaaccaatgtatttactgaaaataacaaatgttgtaaattccctgagtgttattctacttgtattaaaaggtaataatacataatcattaaaatctgagggatcattgccagagattgttggggagggaaatgttatcaacggtttcattgaaattaaatccaaaaagttatttcctcagaaaaatcaaataaagtttgcatgttttttattcttaaaacattttaaaaaccactgtagaatgatgtaaatagggactgtgcagtatttctgacatatactataaaattattaaaaagtcaatcagtattcaacatcttttacactaaaaagcc

SEQ ID NO: 246 - protein, 43 aa, Homo sapiens
MAARAVFLALSAQLLQARLMKEESPVVSWRLEPEDGTALCFIF

SEQ ID NO: 247 - DNA, 5755 bp, Homo sapiens
gagtcgcgcacgcgcgcccgggactgcctgcccctctctgtgacttgcctgtgtgtgtgcgtgtgtgtatgtgtgtgtgtgtgtgtgtgtgcgcgcgcgcgtgagtgagagaggagagagggagaagagagcgcgagagagggtgagtgtgtgtgagtgcatgggagggtgctgaatattccgagacactgggaccacagcggcagctccgctgaaaactgcattcagccagtcctccggacttctggagcggggacagggcgcagggcatcagcagccaccagcaggacctgggaaatagggattcttctgcctccacttcaggttttagcagcttggtgctaaattgctgtctcaaaatgcagaggatctaatttgcagaggaaaacagccaaagaaggaagaggaggaaaaggaaaaaaaaaggggtatattgtggatgctctacttttcttggaaatgcaaaagattatgcatatttctgtcctcctttctcctgttttatggggactgatttttggtgtctcttctaacagcatacagataggggggctatttcctaggggcgccgatcaagaatacagtgcatttcgagtagggatggttcagttttccacttcggagttcagactgacaccccacatcgacaatttggaggtggcaaacagcttcgcagtcactaatgctttctgctcccagttttcgagaggagtctatgctatttttggattttatgacaagaagtctgtaaataccatcacatcattttgcggaacactccacgtctccttcatcactcccagcttcccaacagatggcacacatccatttgtcattcagatgagacccgacctcaaaggagctctccttagcttgattgaatactatcaatgggacaagtttgcatacctctatgacagtgacagaggcttatcaacactgcaagctgtgctggattctgctgctgaaaagaaatggcaagtgactgctatcaatgtgggaaacattaacaatgacaagaaagatgagatgtaccgatcactttttcaagatctggagttaaaaaaggaacggcgtgtaattctggactgtgaaagggataaagtaaacgacattgtagaccaggttattaccattggaaaacatgttaaagggtaccactacatcattgcaaatctgggatttactgatggagacctattaaaaatccagtttggaggtgcaaatgtctctggatttcagatagtggactatgatgattcgttggtatctaaatttatagaaagatggtcaacactggaagaaaaagaataccctggagctcacacaacaacaattaagtatacttctgctctgacctatgatgccgttcaagtgatgactgaagccttccgcaacctaaggaagcaaagaattgaaatctcccgaagggggaatgcaggagactgtctggcaaacccagcagtgccctggggacaaggtgtagaaatagaaagggccctcaaacaggttcaggttgaaggtctctcaggaaatataaagtttgaccagaatggaaaaagaataaactatacaattaacatcatggagctcaaaactaatgggccccggaagattggctactggagtgaagtggacaaaatggttgttacccttactgagctcccttctggaaatgacacctctgggcttgagaataagactgttgttgtcaccacaattttggaatctccgtatgttatgatgaagaaaaatcatgaaatgcttgaaggcaatgagcgctatgagggctactgtgttgacctggctgcagaaatcgccaaacattgtgggttcaagtacaagttgacaattgttggtgatggcaagtatggggccagggatgcagacacgaaaatttggaatgggatggttggagaacttgtatatgggaaagctgatattgcaattgctccattaactattacccttgtgagagaagaggtgattgacttctcaaagcccttcatgagcctcgggatatctatcatgatcaagaagcctcagaagtccaaaccaggagtgttttcctttcttgatcctttagcctatgagatctggatgtgcattgtttttgcctacattggggtcagtgtagttttattcctggtcagcagatttagcccctacgagtggcacactgaggagtttgaagatggaagagaaacacaaagtagtgaatcaactaatgaatttgggatttttaatagtctctggttttccttgggtgcctttatgcggcaaggatgcgatatttcgccaagatccctctctgggcgcattgttggaggtgtgtggtggttctttaccctgatcataatctcctcctacacggctaacttagctgccttcctgactgtagagaggatggtgtctcccatcgaaagtgctgaggatctttctaagcaaacagaaattgcttatggaacattagactctggctccactaaagagtttttcaggagatctaaaattgcagtgtttgataaaatgtggacctacatgcggagtgcggagccctctgtgtttgtgaggactacggccgaaggggtggctagagtgcggaagtccaaagggaaatatgcctacttgttggagtccacgatgaacgagtacattgagcaaaggaagccttgcgacaccatgaaagttggtggaaacctggattccaaaggctatggcatcgcaacacctaaaggatcctcattaagaaccccagtaaatcttgcagtattgaaactcagtgagcaaggcgtcttagacaagctgaaaaacaaatggtggtacgataaaggtgaatgtggagccaaggactctggaagtaaggaaaagaccagtgccctcagtctgagcaacgttgctggagtattctacatccttgtcgggggccttggtttggcaatgctggtggctttgattgagttctgttacaagtcaagggccgaggcgaaacgaatgaaggtggcaaagaatgcacagaatattaacccatcttcctcgcagaattcacagaattttgcaacttataaggaaggttacaacgtatatggcatcgaaagtgttaaaatttaggggatgaccttgaatgatgccatgaggaacaaggcaaggctgtcaattacaggaagtactggagaaaatggacgtgttatgactccagaatttcccaaagcagtgcatgctgtcccttacgtgagtcctggcatgggaatgaatgtcagtgtgactgatctctcgtgattgataagaaccttttgagtgccttacacaatggttttcttgtgtgtttattgtcaaagtggtgagaggcatccagtatcttgaagacttttctttcagccaagaattcttaaatatgtggagttcatcttgaattgtaaggaatgattaattaaaacacaacatctttttctactcgagttacagacaaagcgtggtggacatgcacagctaacatggaagtactataatttacctgaagtctttgtacagacaacaaacctgtttctgcagccactattgttagtctcttgattcataatgacttaagcacacttgacatcaactgcatcaagatgtgacatgttttataaaaaaaggaaaaaaaacatttaaaactaaaaaatatttttaggtattttcacaaacaaactggcttttaaataaatttgcttccatattggttgaataagacaaaaacaattaaactgagtgggaagtgaataaaaaaaggctttaggtatcgattccatatttttcaaagccaaatatgtaaatgctaaggaaagtaaacaaagaggagattccaatcttgtaatttaatattgttattaaaactttaatgtatcctattctttaacatttggtgttaatataaaattacttggcaatgcttgacatttgaaataaacatttttctattgttttattgcaagtggtccaattaattttgcttagctacagtttggtcataaatcaagtgagtttaaagacactaccaagttgttaggtgcccagagaaaatttctcccttttaaaaaggccaggtgatttttcaaatgtaatcttgcccccaaagtaatatctgaatatctttttgacatgtctaaatatatatatatataaagaaatatttgttaacacaaaagcatttgatctatgtagataaatgctaatagatttaaaaagctaatattaacaaataccagaatacgtgaagttccatttttaaagtgtttgagcttacagaagagaaacattcattttaaatgaagtaaaaaatgccttgaaagtaattctttagatagttgcccattgattaaattccaaaaactaaatatgtttttagctttaaaattataaaagctgtcataaactttatatattatgaattttaaaatatgtttgagtctcctgcaatatagtttcatcccattgacatcaattaaaaataaccctaatatattatttttatatttattcctcaggtggaatggctattttaatatgcccagtgtggataaaatgtcacatttctgtaacttttgactaaagagcctatatttatctagttaatgaatttaaaggatctatctttcccttcataaaatacctcttatttccattaaagccccccaagtttaattaatttaggattttgaatgattattgacatccaatagttatttttaatatttgtattcttgttatttctggaagaaagcctttgtgtagcacttggtattttgcaaagtgcttttaaaacattcttacttaccgtatttcatagaagggaaggaaaaatgtaaggtttaacagtaagcacttgcattgaacatggaggcatgtggtatcatgatattcttcactaaatttagctgtccctaatcacagatcctaaggtaatataatataattttagtgcatttctcctcatcaggaatgctggaggtgcattttaagttttaataataagtgctagaatgaccaaattgcagactaattgtttccatattgtacttaaaatgagtttttaaaagtgaaaaagaaatgactatatacaatcaatgctatttattgtacctctgggcctactcttctaaaaattgtagcttatcgatttttctctgtcaagcttgaactaatgtaaataattgaaataatgtaaagttatattttcatgtttttatagatacaacatgacaagaatacataatgtaagagtatttcaactatggataatgttgattggataatgcacatctcagttacaagcagtactcatagtttaatatccatgtaacggtgcatcaatatattgctatataaatatgtctgtgtgcatataagtgaaaagtggtcaaacaagagtgatgacagctgtctaaaggtttttttattcattttatataaaaactgttatggaaagaccaaaatgtttatgaactattcttatgtaaatttacaattgtcctttactgtacttttttgtttacagtatagtaccttattttctgctgtgttaagtgggtgtcaaactccaagaagacatacactttctataacttctattgaagatattggaatttccaatttttcatgtgtactatgtcagaaaatgctttcgattttatttttaaatctaacatcggatggcttttccggagtgttgtaaaaacttcaatcatacataaaacatgttcttacaaaaggcaaa

SEQ ID NO: 248 - protein, 883 aa, Homo sapiens
MQKIMHISVLLSPVLWGLIFGVSSNSIQIGGLFPRGADQEYSAFRVGMVQFSTSEFRLTPHIDNLEVANSFAVTNAFCSQFSRGVYAIFGFYDKKSVNTITSFCGTLHVSFITPSFPTDGTHPFVIQMRPDLKGALLSLIEYYQWDKFAYLYDSDRGLSTLQAVLDSAAEKKWQVTAINVGNINNDKKDEMYRSLFQDLELKKERRVILDCERDKVNDIVDQVITIGKHVKGYHYIIANLGFTDGDLLKIQFGGANVSGFQIVDYDDSLVSKFIERWSTLEEKEYPGAHTTTIKYTSALTYDAVQVMTEAFRNLRKQRIEISRRGNAGDCLANPAVPWGQGVEIERALKQVQVEGLSGNIKFDQNGKRINYTINIMELKTNGPRKIGYWSEVDKMVVTLTELPSGNDTSGLENKTVVVTTILESPYVMMKKNHEMLEGNERYEGYCVDLAAEIAKHCGFKYKLTIVGDGKYGARDADTKIWNGMVGELVYGKADIAIAPLTITLVREEVIDFSKPFMSLGISIMIKKPQKSKPGVFSFLDPLAYEIWMCIVFAYIGVSVVLFLVSRFSPYEWHTEEFEDGRETQSSESTNEFGIFNSLWFSLGAFMRQGCDISPRSLSGRIVGGVWWFFTLIIISSYTANLAAFLTVERMVSPIESAEDLSKQTEIAYGTLDSGSTKEFFRRSKIAVFDKMWTYMRSAEPSVFVRTTAEGVARVRKSKGKYAYLLESTMNEYIEQRKPCDTMKVGGNLDSKGYGIATPKGSSLRTPVNLAVLKLSEQGVLDKLKNKWWYDKGECGAKDSGSKEKTSALSLSNVAGVFYILVGGLGLAMLVALIEFCYKSRAEAKRMKVAKNAQNINPSSSQNSQNFATYKEGYNVYGIESVKI

SEQ ID NO: 249 - DNA, 4862 bp, Homo sapiens
actgcgcggctccccgcgccgcagctgggcaccagcagcaccacggaccgcccctgtgctcgcccgacggcgccccgcggcgctttaagagacggcctggcagcccagccccagccgcccagaccggcgagaccagcctgcgggagcagccccatggcggagcagctggccctggtgattgggggcaccatcggggggctgctgctgctgctgttgatcggggcaagctgctgtctgtggagaaggttctgtgccaccctcacctatgaggagctgcctgggacaccagccatggccaccacagctgcctccagtgggcagcgggacaggccctgccagccgcatgctaggacccaactgagcaggccaccagctgtgccattcgtggtgcccccaacccttcaaggccgagattgggtgcccctgcacagtggagagtgggccgatgccccatgggacccctgcccggcatcagagctgctgcctcacacctccagcggcggccttggagatgcatgtatggtgggggccatcaacccagagctgtacaagttcccggaggacaaaagtgagaccgacttccccgacggctgcctggggcggctgtggttctcggtggaatatgagcaggaggctgagcggctgctggtgggcttgatcaaggcacagcacctgcaagccccctcggagacctgcagccccctggtgaagctctacctgctgcccgatgagcggcgcttcctccaatccaagaccaaacgcaaaacctccaacccgcagtttgacgagcacttcatctttcaggtgtccagcaagaccatcacccagagggtgctgaagttctccgtctaccacgtggacaggcagaggaagcaccagctcctgggccaggtgctcttccccttgaagaatgagaccctagtgggggactgccggcgtgtcatctggagagacctggaggccgagagcctggagcccccctcggagtttggcgacctccagttctgcctcagctacaacgactacctgagccgcctgacggtggttgtgctgcgtgccaagggcctccggctccaggaggacagaggcattgtcagtgtgtttgtcaaagtgtctctgatgaaccacaacaagtttgtcaagtgcaagaagacttcagctgtgctgggctccatcaaccctgtgtacaatgagaccttcagcttcaaggccgatgccaccgagctggataccgctagcctcagcctgactgtggtgcagaacatggaaggggacaagagccagcagctgggccgagtggtggtgggcccctacatgtacacccgcggcagagagctggagcactgggacgagatgctcagcaagcccaaggagctggtgaagcgctggcatgcgctctgccgcaccacggagccctgacccttcgcccagcaccgcggttccgctttgggagccgaccatcctcgcagttgcatgtgacagccacagccacacgcatggacgtttcatccaacagctccccgagctgccagccagcccgagccaggaggacgtgagtgctgatatgcaggagagaagaggggacaaagaagccctggcccggtcagcggctctggccatacagccttccgacacactccctcctccttatctgcggggctgcctgggctcggaatcccggctcctggtcctcacagccctgatttggaccagaatctcagatgctcagaagaaagatcctgtttagtgatgacccagctctacctgctgaatggacctgcagggtaaacttgggtgcctccatctgggaaagctgatgatgtgttcatgcagtcgatgaccctcactgctttttcagccagggtttctctgccttctgcctggcagagaaaacacactgctatggggaaaatcacagggagggcgctgtgaccagcgcactcaggcaccaagtgtcggcatggctcactgtgctgggtgaaggcctccccgagcattaggtcctccacggggctgtgtcaaatgccctcccacattgtgtcaagtctgcccatggcccaccctccccacagtccaaaaccacacagccctggttctccagctgttctgctgctgtttctgtgctctccctgattaagagcattcagttcctgggctctccctttgagcaggaaatggtgaaagcatgtggctatggtatagcccacagggctgagattgctgtgttgcagtattgatgtaaaatttgttaagaaggaagtacccacagatcactgccatcaactccccagaagttgcactcaagctagtgagcagcccttgtgcttgtcacagttactgtaacaggtagtgtgtatttgcacctggcatcgtgcagcctgcacgtcaacacgttgttttgtgtaactagaacagcacatggaaccactatctctttctcttttttccttctttttcttttttttttttttattttaattttttgagacggagtttccctcttgtcacccaggctggagtgcaatggcgtgatctcggctcactgcaccctccacctcccaggttcaagcgattctcctgcctcagcctcccaagtagctgggattactggcgcccgccaccatgcctggctaattttttttatttttagtagagacggaattttaccatgttggctaggctggtctcaaattcctggcctcaggtgatccacctgcctcagcctcccaaagtgctgggattacaggcatgagtcaccgcacccagcccgaccagtatctttttcttatgcagtgaaacaactttagcaaaagaggcaatgaatgttatactgagtttctacctctttaactccacctccaatttctgtcaatctacaaacacaagtgtcgcctcgcagtgtttcgtatgaacagaatatcttgtgtttgctttttgtcacttatttcacttgcacattttttgtttgtttgtttgtttgtttgtttgttttttgagatggagtcttgctctgtcgcccaggctggagtgcggtggcgcgatctaggcttactgcaagctccgcctcccgggtttacttacaccactgtcctgcctcagcctccggagtagctgggactacagacacctgccaccacgccctgctaattttttgtattttcaagtagagacggggtttcactgtgttagccaggatggtctcgatctcctgacctcatgatctacccgcctcggcctcccaaagtgctgggattacaggcgtgagccaccacgcccggcccacttgcacattttcaaagtagtccgcaaagctgtagtttctaatagcttcatagctcacatgtaataggggttctctgtgtgtttatagagcaggctactacagtggaactgtttctgtttcatctgacatccggatagatgccagccacccccacattccaaggtgagatttctgactagcagtgacttttctagggccgcttggaaaagttgataagtatccttttctgcaggacagagtagactggtatctctgactcatccctgaaaaatctaaatggcaagagactagctggctctctgctctgatggggaggaggttgttgtttgggctgttctctacagacatagtcagggcaaaaagcatacgcatgcttcccatggaccagagaaacctggcctgggttgtctcaaatcctgtccacaaggcaactccagaagaaagaagccctttacatttccataaaacactttagaatcagctagtcaatttccacaaaataaagtgctagaatttgattggatttaattgattatgtagaacaatttgggggccatttgacatcattaaaatattcaatcttcctattcattaacatggtatatctcttcactttaagtcttttgtatgtttctcagaactatttttgtggttttcagtaaagtgttcttgcacatccttcaatagatttattcttagacgttttatatttgtttatggctagtatatacagattctgttgctacaaaactatgttgaccttgttatccagtgagaggctttgtgacattcatttaaattgtaataatttgcagattatttttgtataatcatgtcctctgtgaatgacagttttatttcttcctttcttaatctttatgccttatttagctcttgccaaactgcagtggctgagcaattggacaagataaagaaataaaagtgatccagatcataaagaaagaagtaaaactatatctgcacatgacataatcttgtctatggaaaatcctaaggaatccacacacaaaaaaactactagagctaataagtttggcaaggttgcaagatataaaattggtatacaaattgcagtggctaggacctccagcagaatgctgactataagtagtgatagtgggtattcttgtctcatcctcaatctcaggggtggtgggtgtggcatgtggagagttgtcaatattcaccatgaagtttgatggttgttataggatttttaatgtactcattaacatatattctcaagctgttaaaaagatttttttaattacaaataaggttaaatttctctcaaatacttactctgcaccttttgaaataattttatttttctcctttattctttggatgtgatgacttatactaattgactgttgaatgtcaaaccaaacttaacattcttgtaatagaaaccagcagggtgtgtacacttttgtgtgtgtgcgcaggtttatacacataaacacaacaatacttggacttatttatttaaaatttagatttattagagggagcatggccataaaataaaataaaataaaatttagatttaagtcga

SEQ ID NO: 250 - protein, 421 aa, Homo sapiens
MAEQLALVIGGTIGGLLLLLLIGASCCLWRRFCATLTYEELPGTPAMATTAASSGQRDRPCQPHARTQLSRPPAVPFVVPPTLQGRDWVPLHSGEWADAPWDPCPASELLPHTSSGGLGDACMVGAINPELYKFPEDKSETDFPDGCLGRLWFSVEYEQEAERLLVGLIKAQHLQAPSETCSPLVKLYLLPDERRFLQSKTKRKTSNPQFDEHFIFQVSSKTITQRVLKFSVYHVDRQRKHQLLGQVLFPLKNETLVGDCRRVIWRDLEAESLEPPSEFGDLQFCLSYNDYLSRLTVVVLRAKGLRLQEDRGIVSVFVKVSLMNHNKFVKCKKTSAVLGSINPVYNETFSFKADATELDTASLSLTVVQNMEGDKSQQLGRVVVGPYMYTRGRELEHWDEMLSKPKELVKRWHALCRTTEP

SEQ ID NO: 251 - DNA, 10138 bp, Homo sapiens
gcacgggctggtctctgccctaatgcggcggctggcggcgagaggcgctgcaggggacgcgggggaagtggcggcgccggcagcggacagctcggacagcgcccagggccggagcccgagcccttggaggttgattgacttatgtgcaatttgggacgctggagtttaccttccctccgcagcctggaacagagcctcctctggtgttgcaaggaagaggctgaatgaggcagagaagctgagtgctgtccaggaggcccagttaaagcggctcgaggtgacaagaccccgagtgctggggagcagggagcagggccaggtgccgaggatggccaggcagccaccgccgccctgggtccatgcagccttcctcctctgcctcctcagtcttggcggagccatcgaaattcctatggatctgacgcagccgccaaccatcaccaagcagtcagcgaaggatcacatcgtggacccccgtgataacatcctgattgagtgtgaagcaaaagggaaccctgcccccagcttccactggacacgaaacagcagattcttcaacatcgccaaggacccccgggtgtccatgaggaggaggtctgggaccctggtgattgacttccgcagtggcgggcggccggaggaatatgagggggaatatcagtgcttcgcccgcaacaaatttggcacggccctgtccaataggatccgcctgcaggtgtctaaatctcctctgtggcccaaggaaaacctagaccctgtcgtggtccaagagggcgctcctttgacgctccagtgcaaccccccgcctggacttccatccccggtcatcttctggatgagcagctccatggagcccatcacccaagacaaacgtgtctctcagggccataacggagacctatacttctccaacgtgatgctgcaggacatgcagaccgactacagttgtaacgcccgcttccacttcacccacaccatccagcagaagaaccctttcaccctcaaggtcctcaccaaccacccttataatgactcgtccttaagaaaccaccctgacatgtacagtgcccgaggagttgcagaaagaacaccaagcttcatgtatccccagggcaccgcgagcagccagatggtgcttcgtggcatggacctcctgctggaatgcatcgcctccggggtcccaacaccagacatcgcatggtacaagaaaggtggggacctcccatctgataaggccaagtttgagaactttaataaggccctgcgtatcacaaatgtctctgaggaagactccggggagtatttctgcctggcctccaacaagatgggcagcatccggcacacgatctcggtgagagtaaaggctgctccctactggctggacgaacccaagaaccttattctggctcctggcgaggatgggagactggtgtgtcgagccaatggaaaccccaaacccactgtccagtggatggtgaatggggaacctttgcaatcggcaccacctaacccaaaccgtgaggtggccggagacaccatcatcttccgggacacccagatcagcagcagggctgtgtaccagtgcaacacctccaacgagcatggctacctgctggccaacgcctttgtcagtgtgctggatgtgccgcctcggatgctgtcgccccggaaccagctcattcgagtgattctttacaaccggacgcggctggactgccctttctttgggtctcccatccccacactgcgatggtttaagaatgggcaaggaagcaacctggatggtggcaactaccatgtttatgagaacggcagtctggaaattaagatgatccgcaaagaggaccagggcatctacacctgtgtcgccaccaacatcctgggcaaagctgaaaaccaagtccgcctggaggtcaaagaccccaccaggatctaccggatgcccgaggaccaggtggccagaaggggcaccacggtgcagctggagtgtcgggtgaagcacgacccctccctgaaactcaccgtctcctggctgaaggatgacgagccgctctatattggaaacaggatgaagaaggaagacgactccctgaccatctttggggtggcagagcgggaccagggcagttacacgtgtgtcgccagcaccgagctagaccaagacctggccaaggcctacctcaccgtgctaggacggccagaccggccccgggacctggagctgaccgacctggccgagaggagcgtgcggctgacctggatccccggggatgctaacaacagccccatcacagactacgtcgtccagtttgaagaagaccagttccaacctggggtctggcatgaccattccaagtaccccggcagcgttaactcagccgtcctccggctgtccccgtatgtcaactaccagttccgtgtcattgccatcaacgaggttgggagcagccaccccagcctcccatccgagcgctaccgaaccagtggagcaccccccgagtccaatcctggtgacgtgaagggagaggggaccagaaagaacaacatggagatcacgtggacgcccatgaatgccacctcggcctttggccccaacctgcgctacattgtcaagtggaggcggagagagactcgagaggcctggaacaacgtcacagtgtggggctctcgctacgtggtggggcagaccccagtctacgtgccctatgagatccgagtccaggctgaaaatgacttcgggaagggccctgagccagagtccgtcatcggttactccggagaagattatcccagggctgcgcccactgaagttaaagtccgagtcatgaacagcacagccatcagccttcagtggaaccgcgtctactccgacacggtccagggccagctcagagagtaccgagcctactactggagggagagcagcttgctgaagaacctgtgggtgtctcagaagagacagcaagccagcttccctggtgaccgcctccgtggcgtggtgtcccgcctcttcccctacagtaactacaagctggagatggttgtggtcaatgggagaggtgatgggcctcgcagtgagaccaaggagttcaccaccccggaaggagtacccagtgcccctaggcgtttccgagtccggcagcccaacctggagacaatcaacctggaatgggatcatcctgagcatccaaatgggatcatgattggatacactctcaaatatgtggcctttaacgggaccaaagtaggaaagcagatagtggaaaacttctctcccaatcagaccaagttcacggtgcaaagaacggaccccgtgtcacgctaccgctttaccctcagcgccaggacgcaggtgggctctggggaagccgtcacagaggagtcaccagcacccccgaatgaagcttacaccaacaaccaagcggacatcgccacccagggctggttcattgggcttatgtgcgccatcgccctcctggtgctgatcctgctcatcgtctgtttcatcaagaggagtcgcggcggcaagtacccagtacgagaaaagaaggatgttccccttggccctgaagaccccaaggaagaggatggctcatttgactatagtgatgaggacaacaagcccctgcagggcagtcagacatctctggacggcaccatcaagcagcaggagagtgacgacagcctggtggactatggcgagggtggcgagggtcagttcaatgaagacggctccttcatcggccagtacacggtcaaaaaggacaaggaggaaacagagggcaacgaaagctcagaggccacgtcacctgtcaatgctatctactctctggcctaacggagcccacccaggcacagccaccactttgcaagtgggaggaggggagaaggggagacaaaaccactgcagacctaccacgaagccaccaccaccttcagtaacaagggtacgatatgggggtctgccaagctgtgaggaccagtagccaccaagccacccacaagccccctcccaatgaccccccttcagccccgggtgccaccagtgtgggagagctggagccgtggctgagctcagctggagggagcctggccccttgcccggtctcgcagccaccccgagcgttccaccacactgtccgcccttggcctcggcacacgctcaccttttctgttggttacgggacttctcattgtcttaatttcgctttgtgcatcttcccctccagacccaatgtctctgttttcttttccttttgaaaaagagtccctggaaaagaaagaataagtggattctcccccaggagaatcctttttgcaaagataggcaaaaaggattgaatccataccagaacacgtagacaggctgtaatattcaaaccacctctgggccaatgcatttccaaaggatgcctttctcgccatatgcctcccctggcccccagcccctctgcctcggccttgtcagttgctgagctgggcttggctcctttctggaaaatgacagtatttttggcagggagaaggtgcgcaggcctccttgctgctctctggtttggttgggaggtgtgtttacctcttgctcctcattcctcccctgcccttttctctggaatatctaagatgtgagctgcattgactctgaagacgtttgaggaacaggagtgggcactgatagaaaggacttcaacgccagtgactgtgtacctccagcagaagaaaatcaggtgtctggtcttgggggcactgtgctcacttctagagagaagaaaaaggctgggtttggacttcatgcctcctcactggtgaaacccaggatgtagatagagggccacacccaccctgtccagagtagagggcacctgtccacgtggccagggcccatgctgccaccctcgaggagatggaaccctgtgatgcaaaagctttgctggtgtgtttggggcataaggcactgctccccttccatctctagcagatatcatcttctcagccaattctgtaggacactgaggctcttgtttgacatggtgtgtggatggggacttgccccaagactgagcaggtctgccctttcattggggtgtatacatatcaggggaccctgaggtggcaccgtactcagtgttgtgatgcccccacctagggaggactcaatgctctttgtatgccttatgcagcgctgatctgtccctggagttcccaggttcccagctccccccctgcaagccttgaagcctccagcaacgtctatctccaggagagcagggcagcctatgcaagtgttccggcaggaccagaagtggccactcaacacacgtcctcaccagtcaccccaaatggagacactcgcagacctgcagttctcagaccgaaggtgctgccttcatcctccccacctaatgcatttttgaaaccaaaggtacctagcctcagagacagagaaggagagggggagatcttgagtctaagaggaaccctttagctgtttctgcagctgaggtcagtttcaggagggtgaagctgatccccaggaatggatcagctgccatgggcacagcctccgatttgagcctctccggctgccagccagggggcctgggccagaccagggctctgtccttccgtgactttattaaagcaacatttgccacatgtttaagccgcaaaggtattagcaatgcttgcatcattaataatcattcagttgaaggtcaagcccatagacacacactctctgctggtaagaaaccatagcccagaactgagccaataaggttgtttgaacctgagagtgtgtaatggtcatttgggccaagcctcagctagggctgctgcctggacgcctgaggggcagcttatcacagtgcaaggggacagggtaaacagcagggggtggggtgtgagcttggagggcccctcccctggatttcctccaacacctgcttggatactaggcccactgtccctgaagggaatgtcagggaagtgtgcctgtgagctgaattaaaggactggcctttccagaaaacgctttggatctgagcagagtagtcagtttctcagacactcattccatactgcaccgtacatgccagcgtacccattgcaccgaaagcaggcccttagggcaggaagggacgatgagcaagtctgccacaccacctggtgactgggaagggctgcttctctcgtaagggtcttggggagaagtaagcccgcagcctgcctctgcacctcgttccagtgtcctgccaggctctgtactgtcctttgtgtatgaagaaaatgctgttagccctctctcaggctgctgttctgtgggtgctgagagctgccccccatcaccacgccatcacacccctctgagcagaagcaaatctgaggctgaagaattaagttttccccaagcaaggaaggcaggtggtcagagagatcaaacgctgaggcgtggggattgcaggattcaggaggcagcccctttggggaagaggagggtgcattttccatggagcccatgtcagagtccactccagctcagcaggaaagtggaattgcccagtactgcctgccagctgggtctcccaagcaactaccccaagacataccaacagtgaagccaggacagcaccatgccatcggcgctccagtctgtctggctgggaggaaagtgctgggcatcttacagtaactctagaagttcctttgactaggctgcaatcccacctatatgctcagccctaagagctgtggtttcctgtgctctcatttgtccattcattcattcattcattcattcagcaaataatctgaaatccagtctgaactaaggcctgagctgtggataccatggcgcgtgagttagatgtggtccctgccctcatggggctgacagtcctaaaatcaagtgctaggacacagtggccattgagctgggagcattcttccctctaccgcttaagccactgatggctgcgagcttgaagagagggattctgagggagagcttggtccatctggtcaccaaggctgggcgggacagagcagtcaagaaccacggtgtggcttgagaaacagtcctgcttcctgagcctctttgctctgcctcttggggcaagctccttaacctgtctgtatttttatgcctctgtctcccattcagttcctccttgaatacctctttctacagagaggcacgggctcccctgaaggattgtcgaggccagggttcgggaagtacactgccatcggtcaggggacagctgcctcccaccttgcctgggtgatggtgaatgggactcatcttttcctgccttgcttttgaggagatggttgaatttaagctaacaggaaagccaaaccagcaccctcctttgtgctctgagaggttggagacatctggtccaccccattgcccctgcccctggcaagccctgaagtcgggagaggtgaccacaggtctgaaaatcagccagtgccaacattgcttgccctgcaaggtgcaactgagcccacatagcgcattcatagtttccctgaccacagccttgggaagacggtggaaacccgaggatgtgtgggtttcccagctaacggacaagctcccctgccacacccagtgcccacgcatgctcacatacatacagcagaccacaaccctgttgccaagcagtgcttccaagggatagcgatccagattccaacattgtcttggagagggttagtccacatccaagttgcgtgagataagatgcaaagggctctgtgtggatgaggaacgcaccttagaggagtgggaaaggccaccagggttgggccctgtttaggtaattcctgttggcagcacctagagagagcatctgagctgaaggagtgggaaactttgcccaagcaatggcacgggcagcgggctctttctggcgccctgtgctggagcagggccaagtcttagggcatcacaaacagcccatttgatggagggagcagggacatagcacatttttgtctgtctttgtgaggctgctttgctaactctctgaggagaggaagcctctcgggctttccgtcggctggggctagtgccagagaatcccttctcagtggccagcaggttcctgggaggccggcacaaggcaccgctccccactcatgacaccttggtgcagagtgacctcctgcccagtcaccactccggccagccccagccaaacacacaaaagcccatggttgcggttgcatctacaccgttagttggcaaaggatcctgcttgagctctgcgtggtggccaaggagtagcatggaggagggccctgattttaaaaaggaaaaatagagaggcctcaaaacaatgaaacaaagagcttgatatgtcaagaggagaccaaggccctgggaggcataggcaagccgggcagagtcagaccagtgccctcccttgaccatctcctagcattccttaacctagacaggggctaccccatgtgagtccaagccagactttgtggctgtccccagcctgcacagcccaagcccagggaagtgtcctttctttcccttccttactaataatgggccttcctgagacacattcagagaaggatcagagagaaaggagaaccatccaggagagccacaagcgtccaccaaacagtgtctcaggcctcacctgaagctgctgttcctcctatcagcacactagtattaaatgggtgttccataatgaggagaatggaaataggtacaaggcatctagcttaggacagaatcggatttcggcatgtgaaggaatcccagagctgatctcattgaaatgatctatcgtacagacaaggatatgcaaatccacagaagtgaagggatttttgctcaagatcacatagctggtaaactaaggtaaggttagggcttgaacttgggccttctgactccttgtccagtcagtgttctttcatctcaccacagctgcctcctttgaaacagaggtattaagatctgtccttctggttcaccctctcatacctctttactgcgtctcccacatcccccacatgcctcccaaaatgaaagacaaacaggattgtttctgagaccaagatcagtctgtctgtgatcagcctgtgtgtggttcacccagtcatgcaattaagggcagatctgggccagtggaataggatagctgattggtgtttgttactgtgaaccctagaccgtaccccgtagaatggtgtctcttgctttgtaacacatcgggccttcagtgtgctgtattcctcagaagtgagggcatctcggtccattctgcccatggccacagggtgcagagaggcagcagggcccatgcaagctgccaccctgggatttgctgggctggagttcaacagatgtaaagacttcagtgaagcaataaacacaaaactctgggagaagatatccagaattttgtacattactctgtttctttttcaaaaatgaggcagatcagatgcccctgagctgcccctttttttctgattcccaactgcaatgtcctcagtcagtgttgtccctctgcccggctccccagctctttgccaacctcttcacactccccttgagctgagcatcagtcgcctgtgacgtggccaccttctgtcctgctcccactcccgacccatgctggaccccggaggacctcctgccccgcccccaccacacacccatatcccccaccattccaatttgttctttcccgtggggaattttttttcccagcgtctccatcccttcctacatatccacacacacacaaattggtctgatcttttttccattggttaaacatttaactccatgccagaccttgttttaacccctctcacatcatgttctttccttttttgcgagttattttgcattaaccaactttgtcagtgacagatgcgtatctgagggtgtcacacacgaccttcagcagggaagacttctgggccatggagggccgtctaatacatggacttataaactgactgcatgagcaatgaaaaggccaaattattctgaattttttttgaatcactgtaaaaaaactgatttcttttgtatagagaacactaaacgtataataaaagttgttcaaaatggaaaaaaaaaaaaaaaaaa

SEQ ID NO: 252 - protein, 1169 aa, Homo sapiens
MARQPPPPWVHAAFLLCLLSLGGAIEIPMDLTQPPTITKQSAKDHIVDPRDNILIECEAKGNPAPSFHWTRNSRFFNIAKDPRVSMRRRSGTLVIDFRSGGRPEEYEGEYQCFARNKFGTALSNRIRLQVSKSPLWPKENLDPVVVQEGAPLTLQCNPPPGLPSPVIFWMSSSMEPITQDKRVSQGHNGDLYFSNVMLQDMQTDYSCNARFHFTHTIQQKNPFTLKVLTNHPYNDSSLRNHPDMYSARGVAERTPSFMYPQGTASSQMVLRGMDLLLECIASGVPTPDIAWYKKGGDLPSDKAKFENFNKALRITNVSEEDSGEYFCLASNKMGSIRHTISVRVKAAPYWLDEPKNLILAPGEDGRLVCRANGNPKPTVQWMVNGEPLQSAPPNPNREVAGDTIIFRDTQISSRAVYQCNTSNEHGYLLANAFVSVLDVPPRMLSPRNQLIRVILYNRTRLDCPFFGSPIPTLRWFKNGQGSNLDGGNYHVYENGSLEIKMIRKEDQGIYTCVATNILGKAENQVRLEVKDPTRIYRMPEDQVARRGTTVQLECRVKHDPSLKLTVSWLKDDEPLYIGNRMKKEDDSLTIFGVAERDQGSYTCVASTELDQDLAKAYLTVLGRPDRPRDLELTDLAERSVRLTWIPGDANNSPITDYVVQFEEDQFQPGVWHDHSKYPGSVNSAVLRLSPYVNYQFRVIAINEVGSSHPSLPSERYRTSGAPPESNPGDVKGEGTRKNNMEITWTPMNATSAFGPNLRYIVKWRRRETREAWNNVTVWGSRYVVGQTPVYVPYEIRVQAENDFGKGPEPESVIGYSGEDYPRAAPTEVKVRVMNSTAISLQWNRVYSDTVQGQLREYRAYYWRESSLLKNLWVSQKRQQASFPGDRLRGVVSRLFPYSNYKLEMVVVNGRGDGPRSETKEFTTPEGVPSAPRRFRVRQPNLETINLEWDHPEHPNGIMIGYTLKYVAFNGTKVGKQIVENFSPNQTKFTVQRTDPVSRYRFTLSARTQVGSGEAVTEESPAPPNEAYTNNQADIATQGWFIGLMCAIALLVLILLIVCFIKRSRGGKYPVREKKDVPLGPEDPKEEDGSFDYSDEDNKPLQGSQTSLDGTIKQQESDDSLVDYGEGGEGQFNEDGSFIGQYTVKKDKEETEGNESSEATSPVNAIYSLA

SEQ ID NO: 253 - DNA, 523 bp, Homo sapiens
tttaataggactctaggaacaccagggaaccatggactggagacagtggacaaagccctgttactctgtttggattcttgcaatgaaaactagctttcgcttctctctacactggcatccacatgtacttacttgcaccctgtgatgttacaagtgtgttttatttcctaagcttctgcatgtcatcagaggtatacaaggagtagggagatgcactgaacaaacctccccccaaggtgttattggcagtcagctcttcccattttccagatcagtctgccctgcacataaaatccacagctgctgactgcagggcctgtcactgttaccagttctgcctcttcatcacacagtcagcatgacttttttgctcaatcaaacttaccccaacttggattgttccattggagtggtctggttgctgctactgcgatttcccagctattaacatagacattacagcgctccaaccactcaaagactgcagcaacacagtcatcctggatagcagccacttcaggga

SEQ ID NO: 254 - protein, 823 aa, Homo sapiens
MALPRCTWPNYVWRAVMACLVHRGLGAPLTLCMLGCLLQAGHVLSQKLDDVDPLVATNFGKIRGIKKELNNEILGPVIQFLGVPYAAPPTGERRFQPPEPPSPWSDIRNATQFAPVCPQNIIDGRLPEVMLPVWFTNNLDVVSSYVQDQSEDCLYLNIYVPTEDDIRDSGGPKPVMVYIHGGSYMEGTGNLYDGSVLASYGNVIVITVNYRLGVLGFLSTGDQAAKGNYGLLDLIQALRWTSENIGFFGGDPLRITVFGSGAGGSCVNLLTLSHYSEGNRWSNSTKGLFQRAIAQSGTALSSWAVSFQPAKYARMLATKVGCNVSDTVELVECLQKKPYKELVDQDIQPARYHIAFGPVIDGDVIPDDPQILMEQGEFLNYDIMLGVNQGEGLKFVENIVDSDDGISASDFDFAVSNFVDNLYGYPEGKDVLRETIKFMYTDWADRHNPETRRKTLLALFTDHQWVAPAVATADLHSNFGSPTYFYAFYHHCQTDQVPAWADAAHGDEVPYVLGIPMIGPTELFPCNFSKNDVMLSAVVMTYWTNFAKTGDPNQPVPQDTKFIHTKPNRFEEVAWTRYSQKDQLYLHIGLKPRVKEHYRANKVNLWLELVPHLHNLNDISQYTSTTTKVPSTDITFRPTRKNSVPVTSAFPTAKQDDPKQQPSPFSVDQRDYSTELSVTIAVGASLLFLNILAFAALYYKKDKRRHDVHRRCSPQRTTTNDLTHAQEEEIMSLQMKHTDLDHECESIHPHEVVLRTACPPDYTLAMRRSPDDVPLMTPNTITMIPNTIPGIQPLHTFNTFTGGQNNTLPHPHPHPHSHSTTRV

SEQ ID NO: 255 - DNA, 2907 bp, Homo sapiens
actgcccccgccactcctttagactctggacgtgcggggactggtggcgctcggcctcgcgttataaaaagcggtggggcagggccggcgagacaatctgggaggcgggtaccgggcctcacggatccgcgccgcgccccccacctgtggctgcgcgcggggtgggctgcgctcccctgggcggcgccgggcgcccggggctggtggcgagatgggccgctactctggcaagacgtgccggctgctcttcatgctggtgctcaccgtcgccttcttcgtggcggagctggtctccggctacctgggcaactccatcgcgctgctctccgactccttcaacatgctctccgacctgatctcgctgtgcgtgggcctgagcgccggctacatcgcccggcgccccacccggggcttcagcgccacctacggctacgcccgcgccgaggtggtgggcgcgctgagcaacgcggtcttcctcaccgcgctctgcttcaccatcttcgtggaggccgtgctgcgcctggcccggcccgagcgcatcgatgaccccgagctggtgctcatcgtcggcgtcctggggctgttggtcaacgtggtggggctgctcatcttccaggactgcgccgcctggttcgcgtgctgcctccggggacgcagtcgccgcctgcagcagcggcagcagctggcggagggctgtgtccccggcgctttcggggggcctcagggcgcggaggacccgcggcgcgcggcggacccgacagccccaggctcggactcggccgtaaccctccgggggacctcggtggaaaggaagcgggagaagggggcgaccgtgttcgcaaacgtagcagaacttatacacaacacaaggtttcttctttgaatgcaggtgattccttcaacacccagaatgagccagaagacatgatgaaaaaagagaaaaagtctgaagctctgaatatcagaggtgtacttttgcatgtgatgggagatgccctggggtccgtggttgtggtcatcacggccatcatattctatgtgcttcccctgaagagtgaggacccgtgtaactggcagtgttacattgaccccagcctgactgtcctcatggtcatcatcattttgtcatctgccttcccgcttatcaaggagaccgctgccattctgctacagatggtcccaaaaggagtcaacatggaagagctgatgagtaaactctctgctgtgcctggaattagcagtgtacatgaagtgcacatctgggaacttgtaagtggaaagattattgccaccctgcacatcaagtatcctaaggacaggggatatcaagatgccagcacaaaaattcgagaaatcttccaccatgcgggaatccacaatgtgaccatccagtttgaaaatgtggacttgaaggaacccctggagcagaaggacttactgttgctctgcaactcaccctgcatctccaagggctgtgctaagcagctgtgttgtccccccggggcactgcctctggctcacgtcaatggctgtgctgagcacaatggtgggccctctctagacacatacggaagtgatggcctcagtagaagagacgcaagagaagtggctattgaagtgtctttggatagctgtctgagtgaccacggacaaagtcttaacaaaactcaggaggaccaatgttatgtcaacagaacgcatttttaatctggtactcacataatcagaccatatagacgaggcactttggaaccacaagcttggctcacaaaaagagctttctgggttgtaggcccagactagacttgcagcatgcatgctctgtgttcactaggggttggctgtttgggattttagttaaacgtgtctgtgaatttttatgtaactaactcctttccattcccctgggtgtctcatgctgctctttgactgtttcagcttgaacatgcattttctaaagcaaactgcactagtgtatatatcagggacattaaagtctgggactggggctcaatagctgcggatacagtgttcaaagaagttcttgtttctaaactgattagaacttctagctaatgctcaggtgagatcatagcttaaatacattgaaaaaactaaagtaccacaatagctgtatttttcccaatccccttaacgatcataaaagaggcaagttaagtatttctggcactgaagaaatatcttttttctttgattcatttttgaataaatataaaatgaataactattaaggtagaaaatattctcagaacattctagaggaggtaaaggttagtaggagggcgttggccatctctacattttgtgaggtgagagaaaactaatgtttactttctgctgtgaactgaactgcagctatagaatgtttcaaatgcttaaatatataatacatttttttccatggaagtgagggaatatttcagtttcctgaagtatgacacaaatactcatatactgtcttttagagtcagtatagttggagctgttttcatttagtgctttgataatgatttacttatttttccaaatttcgtttgaattttctttcatatgattgcattgatctatgcagcatttaccagaaaagagtattcctgggatagcagaatgcataacactgagtgttaattcttgtgaaataaataagctagactgccttctctttaattagacatattttaaagtatttattatagttgtcaactagtaactcaatgaaaaagttgatgcccaagggagaaatgagaattagcttaattgctgcctttaatgtgtttttgaggaacttaaaattttctttcatgtcgctgatccatattaccaagttcaaataaaatttttataatcggattcagacccataaccaaactaaaaaaaaaaaaaaaa

SEQ ID NO: 256 - protein, 223 aa, Homo sapiens
MGRYSGKTCRLLFMLVLTVAFFVAELVSGYLGNSIALLSDSFNMLSDLISLCVGLSAGYIARRPTRGFSATYGYARAEVVGALSNAVFLTALCFTIFVEAVLRLARPERIDDPELVLIVGVLGLLVNVVGLLIFQDCAAWFACCLRGRSRRLQQRQQLAEGCVPGAFGGPQGAEDPRRAADPTAPGSDSAVTLRGTSVERKREKGATVFANVAELIHNTRFLL

SEQ ID NO: 257 - DNA, 2132 bp, Homo sapiens
attaacgagtgacagtcttaatgactaacacacctctaacatttcacctctagctcagatgagagagagaatgggacttcttggtactgattgtttttcccatgcctcaattggtttcttttagggagctacaaatttacgtgttcactggtgattgatcttttcatccagcacaatggacagaagtctaaggaacgtccttgtggtttcctttgggttcctgcttctctttacagcctatggaggtctgcagagcctgcagagcagcctgtacagcgaggagggcctgggtgtcacagcgctcagcaccctctatggaggcatgctcctgtcctccatgttcctcccaccgctcctcatcgagaggctgggctgcaaggggaccatcatcctctccatgtgtggctacgtggccttctccgtgggcaacttcttcgccagctggtacactttgatccccacctccatactgctgggactcggggccgccccgctgtggtctgcacagtgcacatacctcacgatcacgggaaacacacatgcagagaaggcgggaaagcgtggcaaagacatggtgaaccagtattttggcatcttcttcctcatattccagtcatccggtgtgtggggcaacttgatctcatcgctggtatttggccagactcccagccaagagacccttccagaagagcagctcacgtcctgtggggccagtgactgcctgatggccaccacaaccaccaacagcacccagaggccctcccagcagctggtctacaccctcctgggcatctacactgggagtggtgtcctggctgtcctgatgatagctgcgttcctccaacccatacgagatgttcagcgggaaagtgaaggagagaagaaatcagtacctttctggtccactttactgtcgactttcaagctatatagagataaacgtctgtgcctcttaattctgctgccgctgtacagtggattgcagcaaggattcctctccagcgaatacacaaggtcctatgtcacctgcaccctgggcatccagttcgtcggctacgtgatgatctgcttctcggccactgacgcgctgtgctccgtgttgtatggaaaggtctcgcagtacacgggcagggctgtgctgtacgtgctgggcgcggtgacccacgtgtcctgcatgattgccctactgctgtggagacctcgtgctgaccatctggcagtgttcttcgtattctctggcctgtggggcgtggcagatgccgtctggcagacacaaaacaatgctctctacggcgttctgtttgagaagagcaaggaagctgccttcgccaattaccgcctgtgggaggccctgggcttcgtcattgccttcgggtacagcatgtttttgtgcgtgcacgtcaagctctacattctgctgggggtcctgagcctgaccatggtggcgtatgggcttgtggagtgcgtggagtccaagaacccgatcagaccccacgctccaggacaggtcaaccaggcagaggatgaagaaatacaaacaaaaatgtgagagcagtgaggtccgaggaggatgaactcagaaagcaccagccagagaattttcttagaagatgcctcaggacatagagcggctcctcatcaccatctcagcacaatttggccattctgaagagatcatgttatttcactcttcatgtattttttttctattctaacaaatttttcgtccaccatcttaacagagatcaagtgtatacatgaaggtatcagttcatttaattttagatgcaaaagaaaaaggtctaacgtacaatcagccaattagaatttgcctgaaatcatagactcaccctagttttattgctgtagttgtttttaagaattggaagcctgcttaaaaaatgtagttgagccccataattttacaaatgggcgaacttttaaacttctaactctacttggatcaaaacctcatacattttacaaaggggtcctgacaagtcagctgactcaacctcacagagtcagggggtgacaaagccagactggggctcaggattcctgaaacgtgtggggtctgcgtttctaaataaagacggttatttaatggaaaaaaaaaaaaaaaaaaaaaa

SEQ ID NO: 258 - protein, 457 aa, Homo sapiens
MDRSLRNVLVVSFGFLLLFTAYGGLQSLQSSLYSEEGLGVTALSTLYGGMLLSSMFLPPLLIERLGCKGTIILSMCGYVAFSVGNFFASWYTLIPTSILLGLGAAPLWSAQCTYLTITGNTHAEKAGKRGKDMVNQYFGIFFLIFQSSGVWGNLISSLVFGQTPSQETLPEEQLTSCGASDCLMATTTTNSTQRPSQQLVYTLLGIYTGSGVLAVLMIAAFLQPIRDVQRESEGEKKSVPFWSTLLSTFKLYRDKRLCLLILLPLYSGLQQGFLSSEYTRSYVTCTLGIQFVGYVMICFSATDALCSVLYGKVSQYTGRAVLYVLGAVTHVSCMIALLLWRPRADHLAVFFVFSGLWGVADAVWQTQNNALYGVLFEKSKEAAFANYRLWEALGFVIAFGYSMFLCVHVKLYILLGVLSLTMVAYGLVECVESKNPIRPHAPGQVNQAEDEEIQTKM

SEQ ID NO: 259 - DNA, 945 bp, Homo sapiens
atggaaaaaagaaatctaacagttgtcagggaattcgtccttctgggacttcctagctcagcagagcagcagcacctcctgtctgtgctctttctctgtatgtatttagccaccaccttggggaacatgctcatcattgcgacgattggctttgactctcacctccattcccctatgtacttcttccttagtaacttggcctttgttgacatctgctttacgtcgactacagtcccccaaatggtagtgaatatcttgactggcaccaagactatctcttttgcaggctgcctcacccagctcttcttcttcgtttcttttgtgaatatggacagcctccttctgtgtgtgatggcgtatgatagatatgtggcgatttgccaccccttacattacaccgccagaatgaacctgtgcctttgtgtccagctagtggctggactgtggcttgttacttacctccacgccctcctgcatactgtcctaatagcacagctgtccttctgtgcctccaatatcatccatcatttcttctgtgatctcaatcctctcctgcagctctcttgctctgacgtctccttcaatgtaatgatcatttttgcagtaggaggtctattggctctcacgccccttgtctgtatcctcgtatcttatggacttatcttctccactgttctgaagatcacctctactcagggcaagcagagagctgtttccacctgcagctgccacctgtcagtggtggtgttgttttacggcacagccatcgccgtctatttcagcccttcatccccccatatgcctgagagcgacactctgtcaaccatcatgtattcaatggtggctccgatgctgaatcctttcatctataccctaaggaacagggatatgaagaggggacttcagaaaatgcttctcaagtgcacagtctttcagcagcaataa

SEQ ID NO: 260 - protein, 314 aa, Homo sapiens
MEKRNLTVVREFVLLGLPSSAEQQHLLSVLFLCMYLATTLGNMLIIATIGFDSHLHSPMYFFLSNLAFVDICFTSTTVPQMVVNILTGTKTISFAGCLTQLFFFVSFVNMDSLLLCVMAYDRYVAICHPLHYTARMNLCLCVQLVAGLWLVTYLHALLHTVLIAQLSFCASNIIHHFFCDLNPLLQLSCSDVSFNVMIIFAVGGLLALTPLVCILVSYGLIFSTVLKITSTQGKQRAVSTCSCHLSVVVLFYGTAIAVYFSPSSPHMPESDTLSTIMYSMVAPMLNPFIYTLRNRDMKRGLQKMLLKCTVFQQQ

SEQ ID NO: 261 - DNA, 3561 bp, Homo sapiens
gcgcggcgggcggcccctccccctgccaggtccgggcgggtgcctggagccgccagagtttccgcacccgggagggagatgcggccggggctcaggctccttgcagattcctaaccagcataatgctggagccgggagccaccaacctgcagttttcagaatggccgtgttggacactgatttggatcacattcttccatcttctgttcttcctccattctgggctaagttagtagtgggatcggttgccattgtgtgttttgcacgcagctatgatggagactttgtctttgatgactcagaagctattgttaacaataaggacctccaagcagaaacgcccctgggggacctgtggcatcatgacttctggggcagtagactgagcagcaacaccagccacaagtcctaccggcctctcaccgtcctgactttcaggattaactactacctctcgggaggcttccaccccgtgggctttcacgtggtcaacatcctcctgcacagtggcatctctgtcctcatggtggacgtcttctcggttctgtttggcggcctgcagtacaccagtaaaggccggaggctgcacctcgcccccagggcgtccctgctggccgcgctgctgtttgctgtccatcctgtgcacaccgagtgtgttgctggtgttgtcggccgtgcagacctcctgtgtgccctgttcttcttgttatctttccttggctactgtaaagcatttagagaaagtaacaaggagggagcgcattcttccaccttctgggtgctgctgagtatctttctgggagcagtggccatgctgtgcaaagagcaagggatcactgtgctgggtttaaatgcggtatttgacatcttggtgataggcaaattcaatgttctggaaattgtccagaaggtactacataaggacaagtcattagagaatctcggcatgctcaggaacgggggcctcctcttcagaatgaccctgctcacctctggaggggctgggatgctctacgtgcgctggaggatcatgggcacgggcccgccggccttcaccgaggtggacaacccggcctcctttgctgacagcatgctggtgagggccgtaaactacaattactactattcattgaatgcctggctgctgctgtgtccctggtggctgtgttttgattggtcaatgggctgcatccccctcattaagtccatcagcgactggagggtaattgcacttgcagcactctggttctgcctaattggcctgatatgccaagccctgtgctctgaagacggccacaagagaaggatccttactctgggcctgggatttctcgttatcccatttctccccgcgagtaacctgttcttccgagtgggcttcgtggtcgcagagcgtgtcctctacctccccagcgttgggtactgtgtgctgctgacttttggattcggagccctgagcaaacataccaagaaaaagaaactcattgccgctgtcgtgctgggaatcttattcatcaacacgctgagatgtgtgctgcgcagcggcgagtggcggagtgaggaacagcttttcagaagtgctctgtctgtgtgtcccctcaatgctaaggttcactacaacattggcaaaaacctggctgataaaggcaaccagacagctgccatcagatactaccgggaagctgtaagattaaatcccaagtatgttcatgccatgaataatcttggaaatatcttaaaagaaaggaatgagctacaggaagctgaggagctgctgtctttggctgttcaaatacagccagactttgccgctgcgtggatgaatctaggcatagtgcagaatagcctgaaacggtttgaagcagcagagcaaagttaccggacagcaattaaacacagaaggaaatacccagactgttactacaacctcgggcgtctgtatgcagatctcaatcgccacgtggatgccttgaatgcgtggagaaatgccaccgtgctgaaaccagagcacagcctggcctggaacaacatgattatactcctcgacaatacaggtaatttagcccaagctgaagcagttggaagagaggcactggaattaatacctaatgatcactctctcatgttctcgttggcaaacgtgctggggaaatcccagaaatacaaggaatctgaagctttattcctcaaggcaattaaagcaaatccaaatgctgcaagttaccatggtaatttggctgtgctttatcatcgttggggacatctagacttggccaagaaacactatgaaatctccttgcagcttgaccccacggcatcaggaactaaggagaattacggtctgctgagaagaaagctagaactaatgcaaaagaaagctgtctgatcctgtttccttcatgttttgagtttgagtgtgtgtgtgcatgaggcatatcattaatagtatgtggttacatttaaccatttaaaagtcttagacatgttattttactgatttttttctatgaaaacaaagacatgcaaaaagattatagcaccagcaatatactcttgaatgcgtgatatgatttttcattgaaattgtattttttcagacaactcaaatgtaattctaaaattccaaaaatgtcttttttaattaaacagaaaaagagaaaaaattatcttgagcaacttttagtagaattgagcttacatttgggatctgagccttgtcgtgtatggactagcactattaaacttcaattatgaccaagaaaggatacactggcccctacaatttgtataaatattgaacatgtctatatattagcatttttatttaatgacaaagcaaattaagtttttttatctcttttttttaaaacaacatactgtgaactttgtaaggaaatatttatttgtatttttatgttttgaatagggcaaataatcgaatgaggaatggaagttttaacatagtatatctatatgcttttccccataggaagaaattgactcttgcagtttttggatgctctgacttgtgcaatttcaatacacaggagattatgtaatgtaatattttacataagcggttactatcaattgaaagttcaagccatgctttaggcaagagcaggcagcctcacatctttatttttgttacatccaaggtgaagagggcaacacatctgtgtaagctgctttttagtgtgtttatctgaaggccgttttccattttgcttaatgtaactacagacattatccagaaaatgcaaaattttctatcaaatggagccacattcggggaattcgtggtatttttaagaattgagttgttcctgctgttttttatttgatccaaacaatgttttgttttgttcttctctgtatgctgttgacctaatgatttatgcaatctctgtaatttcttatgcagtaaaattactacacaaactagcatgaaaatgtcatattgccttcttaatcaattattttcaagtagtgaactttgtatcctcctttaccttaaaatgaaatcaaactgaccaaatcatcaaaaaaaaaaaaaaaaaa

SEQ ID NO: 262 - protein, 741 aa, Homo sapiens
MAVLDTDLDHILPSSVLPPFWAKLVVGSVAIVCFARSYDGDFVFDDSEAIVNNKDLQAETPLGDLWHHDFWGSRLSSNTSHKSYRPLTVLTFRINYYLSGGFHPVGFHVVNILLHSGISVLMVDVFSVLFGGLQYTSKGRRLHLAPRASLLAALLFAVHPVHTECVAGVVGRADLLCALFFLLSFLGYCKAFRESNKEGAHSSTFWVLLSIFLGAVAMLCKEQGITVLGLNAVFDILVIGKFNVLEIVQKVLHKDKSLENLGMLRNGGLLFRMTLLTSGGAGMLYVRWRIMGTGPPAFTEVDNPASFADSMLVRAVNYNYYYSLNAWLLLCPWWLCFDWSMGCIPLIKSISDWRVIALAALWFCLIGLICQALCSEDGHKRRILTLGLGFLVIPFLPASNLFFRVGFVVAERVLYLPSVGYCVLLTFGFGALSKHTKKKKLIAAVVLGILFINTLRCVLRSGEWRSEEQLFRSALSVCPLNAKVHYNIGKNLADKGNQTAAIRYYREAVRLNPKYVHAMNNLGNILKERNELQEAEELLSLAVQIQPDFAAAWMNLGIVQNSLKRFEAAEQSYRTAIKHRRKYPDCYYNLGRLYADLNRHVDALNAWRNATVLKPEHSLAWNNMIILLDNTGNLAQAEAVGREALELIPNDHSLMFSLANVLGKSQKYKESEALFLKAIKANPNAASYHGNLAVLYHRWGHLDLAKKHYEISLQLDPTASGTKENYGLLRRKLELMQKKAV

SEQ ID NO: 263 - DNA, 6789 bp, Homo sapiens
tcccagccggcctccggggccctccgggctgaaatcgacatttgcctctggcaggaaaatgagcttgtcagtttctgcctccattagaccctcaacccaaaggagcaggagatttcggtagcgttttaactttatctcagaatctgaaagcggaaggccaggcaagctgcacacatcaagcgaaacgcctgaggggcggccagcgcgagggtttctggccatcgaccctcacctcccgggacttccagggtcttccccccaccccgcgcacacctccctgcctcgccccgagggcgtcacgtggcagcgtggggcccgcctcctggtgatgtcacggcgctcgcagccgtcgcgctgaagaaaggatgctcgaggatgctgtccaggtgggcggccgcgggcgcgatgcggcactgcaggtgtaattagcatggtcaatgcgggagcgatgagtggctctggaaacctgatggatttcctcgatgagccgttccctgatgtggggacgtatgaggacttccacaccatcgactggctaagggaaaagtcacgggacaccgacagacacaggaagatcaccagcaagagcaaggagtccatatgggagttcatcaagagcctgctggatgcctggtcgggatgggtggtgatgctgctcatcggcctgctggcgggcaccttggctggggtcatcgatctcgccgtggactggatgacggacctgaaggagggggtctgcctgtctgccttctggtatagccatgagcagtgttgctggacttctaacgagaccacttttgaggacagagacaagtgtcccctgtggcagaaatggtcggagctgctggtgaatcagtcagagggtgccagtgcttacattctgaattacttaatgtacatcctatgggcgctgctgtttgcatttttggctgtctccctggtgcgtgtatttgcaccatatgcctgtggctctggcataccagagataaagaccattttgagcggctttatcatcaggggctacttggggaagtggaccctgctaatcaagacagtcacgctggtgctggtagtgtcctccggtctgagccttgggaaggaagggccgctagtgcacgtggcttgttgctgtggcaacttcttcagcagccttttctccaagtacagcaagaatgagggcaagaggcgggaggtgctttcagctgcagcggctgctggagtctctgttgcctttggtgcaccaattggaggcgtgcttttcagtctagaagaggtcagttactactttcccctgaagaccttgtggaggtcatttttcgcagccctggtggcggcctttacgctgagatccatcaatccctttgggaatagccgtctcgttctcttttatgtggaataccacacgccctggtacatggctgaactcttccccttcatcctgcttggggtcttcgggggcttgtggggaaccctcttcatccgctgcaacatcgcctggtgcaggaggcgcaagaccaccaggctggggaagtacccggtgctggaggtcattgtggtgactgccatcactgccatcattgcctaccccaatccctacacacgccagagcaccagcgagctcatttctgagctgttcaatgactgtggagcccttgagtcttcccagctctgtgactacatcaatgaccccaacatgactcggcctgtggatgacattccagaccggccggctggtgtcggtgtttacacggccatgtggcagctggccctggcactgatcttcaaaatcgtcgttaccatatttacctttggcatgaagatcccgtcgggcctcttcatccccagcatggctgtgggcgcgatagcgggcaggatggtgggaattggcgtggagcagctggcctaccatcaccatgactggatcatcttcaggaactggtgcagacccggtgcagactgtgtcacgccagggctgtacgcaatggtgggagctgcggcctgcctcggtggagttaccaggatgacggtgtcattggtggtcatcatgtttgaattaaccgggggtctggagtacatcgtgcccctgatggcggcggctgtgaccagcaagtgggtagctgatgcatttgggaaagaaggcatctacgaggcccacatccacttaaatgggtaccctttccttgacgtgaaggacgagtttactcaccgcacactggccaccgacgtcatgcggccccggcggggagagccgccactgtcggtgctcacccaggacagcatgactgtcgaggacgtggagacgctcatcaaggagaccgactacaacggcttccccgtggtggtctccagagactccgagcgcctcattggatttgcccagaggagggaactgattctcgcaataaagaacgccagacagaggcaggagggcattgtgagcaattccatcatgtacttcacggaggaaccccccgagctgccggccaacagcccacatcccctgaagctgcggcgcatcctgaacctcagcccgtttacagtgacagaccacactccgatggaaacggtggtggatatcttccggaaactggggcttcggcagtgcctggtgacgcggagcgggagacttcttggcatcatcacaaaaaaggatgttctgagacatatggcccagatggcaaaccaggaccccgaatccatcatgtttaattagcaacaaggtggcaattattttcagaaaaacactgactgtgtcatttaaaaagaaataaatgatatgttattatcccaatgaaagatcatgcattggggacagcagaaacaaaagcttttttggaaaggcggggaagaaggatgaaacctttaaaaacaaaaacaaaaacatcaatgagtaggcattttatagctttaaccccgtatgagtttcaagctgtgtttcctaatgagtttgctactgctgtgggggcatgtgggtgggtaaatgatgtaaatgatgtgatctgtacaagtatgtggagcatgaatgctgactcaagaaacttttactccttctgctcaaggctgatgtttgtaacttatgaacacacgtgaagtgttgagtccaaaagacaaaggggcatcggcatgtcagcgtccttatttattggttcttgaagttttgctgctatgttactgaatcatactaaagacatttgcgcttactttgttgaaaaagaaaaagaaattaaatttgaacacagtgaaagctgcaagtatgccagtgggtccgctcacgaccgtcctgtttcttgctcctgttctcagcctgttatctggcttatccatcagtttctgaaccaacatcaggggcacctgccatgatgagtgtgaagaaatcatttctctatgcaagactggcatcctgggactgcacgatgaactattggagcatacagtactgcggtgtgtctcctcccatacaaagggacacatccttattttgagggtatactcacccgatcattgatttgcatccccatggcatttgcttcatttatttattgcttttgcccatgcattcaatattgatcagctcagcacttccatgggccatagccggtatgcccccagcctgccataagcgtgctttcattttcaagtagcatatgcaagagtccaaacaggctacccaatgttactacttatttttcctctcaggtcttatcagatacggctgtggagaggatgaggcatatgcgttgtcagttggaatccctccaaatggattgcaagagaaatactaaattgattctaaatctgttccattatcttctctgtaggatgcaaaacatccagttgtaatgtataagcatgcacttcatactagcaatcacagcacaggaggacagcattaaattttatatagccaatttgggcactgggcatctttgtatttgaacttaacgacacatttactcttttagtcaggatttcggtcttttctgcgggaaggaattaagctatgtattaggtccaccatacgatctgtgtaagtaagattatcccacttgccctttctctttagtctttgtcccttccttttcactaagtgcccctcatccttttcaatctcattgtcactggatagtgctgtatcacttaggtgtgcattcggctgcaaataacagaaaacccagcaaacactgaagggctggataagaaccctgagagggggtactccaggactgtctccataacatcattgggatccccatcccgttgctatttctttttcaccgtttttaccttttgtcctctggcttattgcctcagagttgcaagatggttcctgaactgtcaggtatcatgtctgctttctaagtgggaagaggaagggagaggcaagcaactaggtacaatgtctatcaggaaagcaaagcttccccagagacgctcagcttgtatccattgactggaagtctgtcacgtggctccccctagccgcacactagtgtgggaaggaaaatattgagctaggcacattactctctgaacgaaattcatattatcttattaaggaagagtgttggtcttcaggaggggaagtttgctgtattggatgccatcatcgtgtccttgtcattgcccttccggttttcattcttgctaaacccctgtgaatgttcttctaaccttcctgttccccaccccttttctcagatttgacctagaattcccagcccaaatccataatttcttagctctaatacgaattttcatgttggacaaaaacctagctacaaatgggtttctatggaacttctaattaatgtgcaaaatacatattttctccaggttaagaaattttaagtcagatcatgctgacacaataagaaaatttgtttgtgtaattcattgacctcttccttccaaaataacatcaagtagccacctcagtgtgacaatatccagtcaatagtagagaatttaatccttggtcctataaaagaataaaattcattgtcgtatttatagcacgtaagccttgagtaacaggtcttaatgttagtgttggtgttgtggtttctgcggaacgtttacaagtgaagttggattctcctgggctttaaatccaaaaagtcttaatgaccgcttcatgtagttcccctcttattcccctgtggtctcctcagagccagcgtgtgctgggaaagagtattagtcatagcctggctttatagaatccaggaggtccttttagctgaaacaagtggcttcaaaagggaacatgaaacagtgaaaagatagccaaaggtcagtgaaaccacagcatttctttctaatctggctgaggccatgggggggaatgaggggaaattatgcttccgggccaaggtcaccgagggggaccttgggatttgtgtcctccccagtgcttagagtagagatacctgcaaattcatggcaaacagttggaagagttacttgactgaaacaacccaatcttactttctttcgtaagttgaacctctgatttattgtggggttcaggctctcctcaatagaaggccagagttggacaggtggactaaggtcaaggatgaggagtctgcagtggggactaccacagcaaactgccttccttccgtggagtcctaactcagccatgtggtccactcacccaggggcccgggggctcagacaaaccccatggggaacatgctgccatgctctgtctttcttgtaaacgtagttgggtagggatcccaagggtatttgctctctccaaatgcagaacttccatccactttatctggtgatctgatgaacagcatggggacgtggaggtgaaataagcatctttcagaataaggtttttttttttttcctcttccagaaccaaaggctttagacatttgtagaactttctggattccttctgaatcgggttttaacataaaaaaccatcaacacatcatgggaaaggagctctttcatgatatacatcacatgtttcttgctctcactgaggaaatgtgttgtacaaaagcaccaaataagggcaccctggaagtgacatgtgtgtttcttctaagtcgtttttagtgcatcccctgcgattgcatgatgctcatgtggcttttagggaaaggcagaatgtgctagaagtcgaagtcattcaatattcagtgcttactgttactttgaaccaggtaatctcagttctttattcagtccttcccaaagaccttacaaaggagatgtgtaaactgatagattttgagcctaataagtcacagaaatggaaaattttagagcagtttgtttcacttaggtgagaactgattactttaaattaccaacatgtgcaaattctacttagtattcattattagatgctaagctggaaaagatgagaaacccaaggagaactattgaattaccacataattgtaatattatgctttaattttgtatgggcagtgttctatcagactaagcttctagcctttgaaatgatttacatgaggagagagcctgtatatctgacttgggaaacattaagcagaccctattttcactggcgcggtaataactatttatttgctatcctagaggtgctgggaatgagcctacgtgcgactttgatgagatatattcacatttggtgttggaacgaccacatagcaacgtgttggtttttttttattgtaacactctgtgtaaacgttgacaccttattaaatattaaatgtctgaactctatttttaaaaataaaacaagcacagagtctgcaacaaacatgtaaa

SEQ ID NO: 264 - protein, 760 aa, Homo sapiens
MVNAGAMSGSGNLMDFLDEPFPDVGTYEDFHTIDWLREKSRDTDRHRKITSKSKESIWEFIKSLLDAWSGWVVMLLIGLLAGTLAGVIDLAVDWMTDLKEGVCLSAFWYSHEQCCWTSNETTFEDRDKCPLWQKWSELLVNQSEGASAYILNYLMYILWALLFAFLAVSLVRVFAPYACGSGIPEIKTILSGFIIRGYLGKWTLLIKTVTLVLVVSSGLSLGKEGPLVHVACCCGNFFSSLFSKYSKNEGKRREVLSAAAAAGVSVAFGAPIGGVLFSLEEVSYYFPLKTLWRSFFAALVAAFTLRSINPFGNSRLVLFYVEYHTPWYMAELFPFILLGVFGGLWGTLFIRCNIAWCRRRKTTRLGKYPVLEVIVVTAITAIIAYPNPYTRQSTSELISELFNDCGALESSQLCDYINDPNMTRPVDDIPDRPAGVGVYTAMWQLALALIFKIVVTIFTFGMKIPSGLFIPSMAVGAIAGRMVGIGVEQLAYHHHDWIIFRNWCRPGADCVTPGLYAMVGAAACLGGVTRMTVSLVVIMFELTGGLEYIVPLMAAAVTSKWVADAFGKEGIYEAHIHLNGYPFLDVKDEFTHRTLATDVMRPRRGEPPLSVLTQDSMTVEDVETLIKETDYNGFPVVVSRDSERLIGFAQRRELILAIKNARQRQEGIVSNSIMYFTEEPPELPANSPHPLKLRRILNLSPFTVTDHTPMETVVDIFRKLGLRQCLVTRSGRLLGIITKKDVLRHMAQMANQDPESIMFN

SEQ ID NO: 265 - DNA, 1869 bp, Homo sapiens
agcaatggagaatgtcactacaatgaatgagtttcttctacttggcctgactggtgttcaggagctgcagcctttcttctttgggattttcttaatcatttacctgataaacttgattggaaatggatctatattggtgatggttgttttggaaccacaactccactcccctatgtatttttttctgggaaacctttcttgtctggatatttcttattcttcagtgacactgcccaagctgctcgtaaacctcgtgtgcagtcgcagggctatatcttttctaggctgtatcacccagctacacttcttccactttttgggaagcacagaggccattttactggctatcatggcctttgaccgttttgttgccatctgcaatcctcttcgctacactgtcatcatgaacccccaggtgtgtattctgttggcagctgcggcctggctcatcagcttcttttacgctctgatgcattctgtcatgactgcacacctgagtttttgtggctctcagaaactcaatcacttcttctacgatgtcaagccgctcttagaattggcctgtagtgacacattactcaatcaatggcttctttccattgtcacaggcagcatatccatgggagctttctttctgactcttctctcctgcttctatgtaattggcttccttctgtttaagaacaggtcctgcagaatactccacaaggctctgtccacttgtgcctcccattttatggtggtatgtcttttctatggacctgtgggcttcacatatattcgtcctgcttcagccacctccatgattcaggaccggataatggccatcatgtatagcgccgtcacccctgtactgaatccactaatctacacccttaggaacaaagaagtgatgatggctctgaagaaaatctttggtaggaagttgtttaaagactggcagcaacaccactaggactaatgagggatatctgatttctattaagactgatttccatcacttcactgtaagaaatgatttgtttacctggtttatatttttctttcaaaaattttgagcacatattatattaggcagtgtagtaggttcaagaaacacaggagcaagcaaaacaaattccataatgtcatcaaacataaagtttaatgtgatggaggccccaaataaccaaacgcgtaagtacatatgtcaggataattcggtggcaaggagaactaaggaggtaggaagtatggggagggttagagtaggaatctgctgtgtaaaaaagaatgtggcatttctcctaggacaaaaacctttggaattttccaagtaatagaagtatcttactgaaattccatatgagataatctttatttttgcctattttttttccttttgtgtttccttcagcaggaatgtactgatgataatttttctcacaacagtttttatctagaatatcatttttgttaatcttaattcttgaagagaatttttaatgggtatttaattttagggagagatttttctagccattgaaaatatcttgtttttccccagcttattgaagtataattaacaaataaaaattgcatatatttaggcttcacaacatgatgctttagtatatgtatacattgtgaagagactaccacaatcaagctaaacctacattactgtccctgcattagtttactgttgaatactagaagttcttcattctatctaactgcattttcatacccattaagccaatgtgacaagctctttgtttcagttggagtgtttgcacaatttaaatttgataaatttttgatagaattaaatttaaatttatcctccaactaaatttttgatagaattaaatttaaatttgtcctcca

SEQ ID NO: 266 - protein, 316 aa, Homo sapiens
MENVTTMNEFLLLGLTGVQELQPFFFGIFLIIYLINLIGNGSILVMVVLEPQLHSPMYFFLGNLSCLDISYSSVTLPKLLVNLVCSRRAISFLGCITQLHFFHFLGSTEAILLAIMAFDRFVAICNPLRYTVIMNPQVCILLAAAAWLISFFYALMHSVMTAHLSFCGSQKLNHFFYDVKPLLELACSDTLLNQWLLSIVTGSISMGAFFLTLLSCFYVIGFLLFKNRSCRILHKALSTCASHFMVVCLFYGPVGFTYIRPASATSMIQDRIMAIMYSAVTPVLNPLIYTLRNKEVMMALKKIFGRKLFKDWQQHH

SEQ ID NO: 267 - DNA, 2239 bp, Homo sapiens
tagacatttatgcagtggttcaaagtctagagtccctacacttctggtacatgacagctgtgtctcgatggagtagactctcagaacagcgcagtttgccctccgctcacgcagagcctctccgtggcttccgcaccttgagcattaggccagttctcctcttctctctaatccatccgtcacctctcctgtcatccgtttccatgccgtgaggtccattcacagaacacatccatggctctcatgctcagtttggttctgagtctcctcaagctgggatcagggcagtggcaggtgtttgggccagacaagcctgtccaggccttggtgggggaggacgcagcattctcctgtttcctgtctcctaagaccaatgcagaggccatggaagtgcggttcttcaggggccagttctctagcgtggtccacctctacagggacgggaaggaccagccatttatgcagatgccacagtatcaaggcaggacaaaactggtgaaggattctattgcggaggggcgcatctctctgaggctggaaaacattactgtgttggatgctggcctctatgggtgcaggattagttcccagtcttactaccagaaggccatctgggagctacaggtgtcagcactgggctcagttcctctcatttccatcacgggatatgttgatagagacatccagctactctgtcagtcctcgggctggttcccccggcccacagcgaagtggaaaggtccacaaggacaggatttgtccacagactccaggacaaacagagacatgcatggcctgtttgatgtggagatctctctgaccgtccaagagaacgccgggagcatatcctgttccatgcggcatgctcatctgagccgagaggtggaatccagggtacagataggagatacctttttcgagcctatatcgtggcacctggctaccaaagtactgggaatactctgctgtggcctattttttggcattgttggactgaagattttcttctccaaattccagtgtaagcgagagagagaagcatgggccggtgccttattcatggttccagcagggacaggatcagagatgctcccacatccagctgcttctcttcttctagtcctagcctccaggggcccaggcccaaaaaaggaaaatccaggcggaactggactggagaagaaagcacggacaggcagaattgagagacgcccggaaacacgcagtggaggtgactctggatccagagacggctcacccgaagctctgcgtttctgatctgaaaactgtaacccatagaaaagctccccaggaggtgcctcactctgagaagagatttacaaggaagagtgtggtggcttctcagagtttccaagcagggaaacattactgggaggtggacggaggacacaataaaaggtggcgcgtgggagtgtgccgggatgatgtggacaggaggaaggagtacgtgactttgtctcccgatcatgggtactgggtcctcagactgaatggagaacatttgtatttcacattaaatccccgttttatcagcgtcttccccaggaccccacctacaaaaataggggtcttcctggactatgagtgtgggaccatctccttcttcaacataaatgaccagtcccttatttataccctgacatgtcggtttgaaggcttattgaggccctacattgagtatccgtcctataatgagcaaaatggaactcccatagtcatctgcccagtcacccaggaatcagagaaagaggcctcttggcaaagggcctctgcaatcccagagacaagcaacagtgagtcctcctcacaggcaaccacgcccttcctccccaggggtgaaatgtaggatgaatcacatcccacattcttctttagggatattaaggtctctctcccagatccaaagtcccgcagcagccggccaaggtggcttccagatgaagggggactggcctgtccacatgggagtcaggtgtcatggctgccctgagctgggagggaagaaggctgacattacatttagtttgctctcactccatctggctaagtgatcttgaaataccacctctcaggtgaagaaccgtcaggaattcccatctcacaggctgtggtgtagattaagtagacaaggaatgtgaataatgcttagatcttattgatgacagagtgtatcctaatggtttgttcattatattacactttcagtaaaaaaaaaaaa

SEQ ID NO: 268 - protein, 347 aa, Homo sapiens
MALMLSLVLSLLKLGSGQWQVFGPDKPVQALVGEDAAFSCFLSPKTNAEAMEVRFFRGQFSSVVHLYRDGKDQPFMQMPQYQGRTKLVKDSIAEGRISLRLENITVLDAGLYGCRISSQSYYQKAIWELQVSALGSVPLISITGYVDRDIQLLCQSSGWFPRPTAKWKGPQGQDLSTDSRTNRDMHGLFDVEISLTVQENAGSISCSMRHAHLSREVESRVQIGDTFFEPISWHLATKVLGILCCGLFFGIVGLKIFFSKFQCKREREAWAGALFMVPAGTGSEMLPHPAASLLLVLASRGPGPKKENPGGTGLEKKARTGRIERRPETRSGGDSGSRDGSPEALRF

SEQ ID NO: 269 - DNA, 10133 bp, Homo sapiens
atctgaataattgaggagctgttcagcagcagcggctgcctcctgccttcctttgccgccaccaccacttcccatcccagctagagagacagctccgcgcagtaagtgcggactgccagccaccagccttggcagccagctcgtcgcctccagccccgaccccgacattcatgcccaggagaaggctgcactgggtccctctgggcctttcctaaaagggagatccctgttcactagatgagttccagaaccatccactaaggctttgtagcccccttccatcagctgaccttcactgcatcccctatcgctcaagatgagtggcttcttcacctcgctggacccccggcgggtgcagtggggagctgcctggtatgcaatgcactccaggatcctacgcaccaaaccagtggagtccatgctagagggaactgggaccaccacggcacatggaactaagctagcccaggtactcaccacagtggacctcatctctcttggcgttggcagctgtgtgggcactggcatgtatgtggtctctggcctggtggccaaggaaatggcaggacctggtgtcattgtgtccttcatcattgcagccgtcgcatccatattatcaggcgtctgctatgcagagtttggagttcgagtccccaagaccacaggatctgcctacacctacagctatgtcactgttggggaatttgtggcatttttcattggctggaacctgatcctggagtacctgattggcactgcggccggagccagtgctctgagcagcatgtttgactcactagccaaccacaccatcagccgctggatggcggacagcgtgggaaccctcaatggcctggggaaaggtgaagaatcatacccagaccttctggctctgttgatcgcggtcatcgtgaccatcattgttgctctgggggtgaagaattccataggcttcaacaatgttctcaatgtgctgaacctggcagtatgggtgttcatcatgatcgcaggcctcttcttcatcaatgggaaatactgggcggagggccagttcttgccccacggctggtcaggggtgctgcaaggagcagcaacatgcttctacgctttcattggctttgacatcatcgccaccactggagaggaagccaagaatcccaacacgtccatcccttatgctatcactgcctccctggtcatctgcctgacagcatatgtgtctgtgagcgtgatcttaactctgatggtgccatattataccattgacacggaatccccactcatggagatgtttgtggctcatgggttctatgctgccaaattcgtagtggccattgggtcggttgcaggactgacagtcagcttgctggggtccctcttcccgatgccgagggtcatttatgccatggctggtgacgggctccttttcaggttcctggctcacgtcagctcctacacagagacaccagtggtggcctgcatcgtgtcggggttcctggcagcgctcctcgcactgttggtcagcttgagagacctgatagagatgatgtctatcggcacgctcctggcctacaccttggtctctgtctgtgtcttgctccttcgataccaacctgagagtgacattgatggttttgtcaagttcttgtctgaggagcacaccaagaagaaggagggcattctggctgactgtgagaaggaagcttgttctcctgtgagtgagggggatgagttttctggcccagccaccaacacatgtggggccaagaacttaccatccttgggagacaatgagatgctcatagggaaatcagacaagtcaacctacaacgtcaaccaccccaattacggcaccgtggacatgaccacaggcatagaagctgatgaatccgaaaatatttatctcatcaagttaaagaagctgattgggcctcattattacaccatgagaatccggctgggccttccaggcaaaatggaccggcccacagcagcgacggggcacacggtgaccatctgcgtgctcctgctcttcatcctcatgttcatcttctgctccttcatcatctttggttctgactacatctcagagcagagctggtgggccatccttctggttgttctgatggtgctgctgatcagcaccctggtgtttgtgatcctgcagcagccagagaaccccaagaagctgccctacatggccccttgcctcccctttgtgcctgcctttgccatgctggtgaacatctatctcatgctaaagctctccaccatcacatggatccggtttgcggtctggtgctttgtgggtctgctcatttattttggatatggcatctggaacagcaccctggaaatcagcgctcgagaagaggccctgcaccaaagcacgtaccaacgctacgacgtggatgaccccttctcagtggaggagggtttctcctacgccacagagggcgagagccaggaggactggggcgggcccactgaagacaaaggcttctattaccaacagatgtcagatgcgaaggcaaacggccggacaagtagcaaagcgaagagcaaaagcaaacacaaacagaactcagaggccctgattgcaaatgatgagttagattactctccagagtaggagaaacacacaagtgggtagaaatggtgatgactgattttcagtaacttaacctgtgggctagaaggtgaaaacttttttggctctcatttcacaaatccagccttccccaaattcaatccctagtcatagcctgtcatttgctacttttgctcttcaggatagttctgttgaagggcttaacctgggtcccctaactggtcgccttgttaaataaaataaataaataaacaagaggctatatgaaattccatcttaggtgcaaccaccagagctgatggtaccaaatgtttcctaggcctttgctttgctggttgaagcccaagcaggggctctgggcagaaggcagaatttcagtcacctgagacatggggacaaagctctgttcttggcatgtcaggctgagtgctgctccccgaggtcagggtgggtagatgggcattggcacttcctgagcaagcatcattttatcctgcaatctcacccaaaattaattcatggaaaagacacatgcttctttttattcaccaacattctcacagcttccaaactataattttaggatccagcaaagttcagggactctggaccattttcccaatggtttcagattcaccataaagcagtcaggcagacccagtgatatggtaagaagcaccatcaaagctctatgtaaatgcccagaagaaaattaaataaccatatcttgcggtaaaagccagaagggcattggcagaaattaactctctgtcatggcctctcttatatcagactgcagctcctggtgatatgatgaaagcgggcaaaggtggagcatgatttcatggcactgatatgccttgaaaaagtaggttgtttgttttataatcagataaaaatttttacaaggagaagtgagccagccactgagatcacattgcaaattctctttcatatttctaaaattataaattctaaagtttttgagataggcaaccacttgattggtgtgtgctactctgaaaacaaaataggctgaagtatagcgacttaggtagttgcattccatgagatcacatttcacttctgaaccttattccttggggctagctcactttcagaggtgtatttttttttcctgttatttcccagagtagtttcactgaagcccagagaaatatctacctggtaagatgtaaatttgggccataaaaggggctattaaaagaattttctcagaaatagaatagatgagagaatttgcaaaggaaaaaaacacacatgggctacaatataaattctactcttgggttacaagaattcctgtggctgcactgagatacgtacaaatgtatgtgaaggcacaatttgaatcaagctatcatagaattaaccaagctattaaaattaatcaagctattaataaaatctctgtgaggatttcctgaaagagggacaaaagaagaaattccttgtcctttctctcctggatgtatcagtatgccaaacgttttccagaacatattcgctagcactcaagtctgttctttctgaaaggctgaggctcatgccatcttggcatgctttaggattatggcaaggaggtaaaagtccattttttcattcaactaacactggttgagaatagacccaatgctaagtgacaggaatgaatagaagcatggcacttgcccttgggggctacagtccatggatgagcagcactggagcctggtaaatgcagataaaacaacaaacttgacaagtctccaggctgatgcactgggttttaacatacatataaagatgaattgaaactagtttttaaaaaatatgctttaaataaattacatatcgtaatcatagccaatgtataccattaaactaaaataactgcaattttctagatattttttattcttctgtagtcattgtttagaactctggtttcctgaggtcattttgtcattttaatatcatgcttgacaatgctatgttttctcttccctagagttaaccataaagatacagtgcctactctgtgaaatacagcattaggaattaattataaactaattatcagtcatcttttgaaaacaaagttttgaattggctataggactcaacaaatctgcctggtgtaaatagaatctgttaagcttgatacatatctagatagatgaggaggggttgtattcattaagcatgagaatagagaaataggagtgcaaaatggcaaaatcttaacgtgggtgaaagagcttccttttactagtgaggtttaagtattaaagtaacaatagcctggtggcagatgaatgcaatttctataggatgggaatggaaaatgtatgctttggttaacaccattgctgttgacttcatgcagattctattaagcactctcatttcaggagccatttttcccacatagtatattagtatattttaagcttagctccctttatttttctaaagttgataaatcacctccctagcaaccttagttttaaaaaaaaaatcactaagatagaaaaagtattttcaggtacatagacatgtttgtcctcaggtttacctgcttctgtgaacagtcccagattttacaatgcagttttcaaataccatcaatcactacaatgacaatattactattttcttaacaggtttctaaacgatgtatgtgtgggatcacattaaaagtaagatcaccttataattatcttagaaactttgccccttgaagggagtccaaggaagacctacattttattgaattctgaatagcaaaagctctccgagtgagatttcattgtgtggatttgtggtttggagccaattacttgattttcttcagattttattctacttatttattggtactctgcttcatttcaaaaggatttgaggcagctactaaaatatatataatacaaaacaaaaattaagtgaggaactcagagcaaacaaaaatagaaacagaaaggataagacaaaactagacgtatatttagtacataaatgcagaaccctgacatgctttactaaatttgccaatgagtgacaccatgaaaaataatagaattagtggtaatgacaagaagaagtacttctgcatgataagaacaaatctttccccatgcaggtagaggtttgaaatagcatagatcattaaaatccacaggtaagcttcaaacctagattttgctagctacatgtgcctggcatatagtgtgtattcaagaaatacctgatgattgacagaatgaatgaattggaggaaaatgaaatatttattcaacaattacttgtggagtgcctattatgtactatggcagatattgatatcgtaagtcagataaaaatccagctcttaagaagtagaggaaatagagcttggtgtggtggcatgtgcctatgatcccagatagttgagagactgagggaggaggatcacttgagcccaggagttcaaggctgcagtgagctatgatcacaccactgtactccagcctgggtaacagaagaataccctgtctcttaaaaaggaaaatcaaataggggaaatgggatatataaataaagaacaatagtgaatgtgtcaggtgagatgacggacttgtaatgtgctgtggggggtcaaatatgaagaaggccttcttcctctggaaaggtcataaagaatgtcacacttgtgttggaacttgtgaagtgggtagaattttatcaagtagaaatgagagaaaggcatgccaagcaaaggatcggcatgaataaggtctactagtttgtggtcctctggctaagaatttgtgctgtgcctccattaagagaaagcaaggagctagtttgcctggagcacatgatttatgcatgacttatacatgcaacaataagaaataatgctaggaaggcaggtgagggatcactcacagagagacttgaatgtcacactgagctgactggctttcctcgggtgagagagtgggaaataattggggaactgacgaaagtgtgaatccaggaaggctgaactttaagaaagctgagacggtggcttccttacctatgcaaggaactaacaagccacatatacactccaaattgatttaacaaattaaagagaaaaatagctgtactttgagtcctgtgtctgcattcatcattaacctaagaaaatacagccatttaatacgtggacaagcaacacaatttaacagccactttaaagttttcaacaataggtttcaacaactaaacctaacaactttttatatctatctaatctaaacagtaaaatctcagctccaggttttactgagcttgagtgctacttttttttttttagacagagtctcattctgtcacccaggctggagtgcagtggcatgatcttggctcactgcaaccttcacctcccgggttcaagctattctcctgcctcagcctcccaagcagctgggattataggcgtgtgccagttctacttcttagtaacaaactagtagctaatcaaatgcctacataatggtcatgataaatctgtttaaataaatggcgggcggaagggagttgttgaatttaacaatccatccttcttcagaatctataggtcagccagaatataaatctagtaattattgaaaaacaaaacacaaactccttcaaagaaatctctctcctctattctgctgaaaagggttggtaaacctgacatcctttcttttattggaagacaaatccaacatttgttagacatccaacatttgttggaagtctaccttacaagaaaccacctcttatctgcaacataaacagaagctacatcaggttgaaaatccacatagaagactggagaaaattgccgtcccctttcgcactaggttttaccaggggcccaagatgtcagaggaaagtccgcggagggccaaacacaggtttacctaattatgaatctcagattagaatgtcttattgtgtggaaaagtcagaactcaggaaatgtgtctgaagccagagcgggggtctgcttacggagtctacgcagcgggtaggggtccactattggagtataaacctcaggtcagtgagtagtgcagaggtgtccctaacttccaatggagggaaagagaggagagcaaaggaaacacatccagaagtcgccacgagggctgtgtgccagcgctccattttcatgctgtttggaacaagacgtgtcaaggaagatgtttctatccaaagtcttcatggagcctctgcttcccctgtacctgtgtagctccctgaaactgaggacccacgtgtctgcaaagacctctggagatcctaagagagagaggcaccagcaggtaaccagtggtggcctggccacgaaagagtatttgaaattcaacagtgagcaagtgcagaaacagcatcccaaaccgcaggccccaccacacgcaggaaccagaaagctgaagtttcaccaaggagtttacttagtatttctcgctgggaatggggatgggtagcaaaaagcccctttcatgtacataatggttggtcctatgtcctacttttattttctctaagagttttagaagaaaggctgttttaatttttttttctccttaagagcaacttcctttttaaaatgctttcctcttcttgtcctgcttgagtaatgcaggcatcattctgaaatcattctgaaacagctaggcagtcgccttttgccaaaattacttctctaagaaaatagagtgttcttttttttaggacttagaacccacaaggggtgagtggaagttttgtagcccatcaaaggtgaatatgtgttctgcagtatcaactaaaacagtgtacaaaatcattaaactgggccgggcgcagtggctcatgcctgtaatcccagcactttgggaggccgaggcgggtggatcacctgaggccaggagttcaagaccagcctgaccaacatggagaaaccccatctctactaaaaatacaaaattagccaggtgtggtgttgcatgcctgtaatcccagctattagggaggctgaggcaggagaatcgcttgaacccgggaggcagaggttgcagtgagtcgagatcacaccattgcactccagcctgggcaataagagcaaaactccgtctcaaaaataataataataataatttaactgtgttctgcacacacagaattacaaaatccctataggactttcacagatagctttgggcttaaggtcttcggacaacaggtagttctaatttcttactctttgggacatttagtacatgttggtacacataaggaaagaaaatggcttatattagagctaggaaacaggggcagcctggatttttatggtaggaactcactctgtgcttttttttttttctgttaagttttcttgacactgacttcggtaacattggctaaagggaattgtgagtcatgtgaatttcacctgcagtgcagactttaaaggactgtgttcattctgatttggggatgaagagaatgttccatgcacatctattgattggtcttggcagttgctgatacgcttgtctcattcacactcccaaaggcgaggatttaccctagaaatcataaacccccactttccaaagcaaagatgctgttaatgttatgatggtgcataaatacctcaactgtctgggctgagagagggggctgcaggtttttaagagagcagctatagtcctcattccatgtagtcacatcatctgatgacaggactccacattctagcttttctcactgtggaaaagaaacgttactgtttaattaatatccaaagttataaatacagcttgtaaattttactaacttgtttctttttcgtttcgtccttgagaagtacaacttgcatttacagatggtaattcctagtgttgttctctgctatctttttttggtatgaaattgctgtatttgttaaagtttgttcgttttgtggtttttaattcccattggtgtgctgtacaatgtagtgtatcatgaagaaagaaataatatgcagatgtattatgaaatgtgttttattttcaaatgtgtggtgttgacaatatattgatttatcaagatactaagggaaaattctaaatttaacaaaatgtgtatattttaataaatgcataaagctttattgtgtgcctttaaatttaaaaatgggtttataaagaaagtcagaaacaaaagtgtcttactataaaatatccatagtaatgtaaagcttttacacgagactaccaaaaaaaaagaaagaaaagaaaaaggagccttcccatattttgttaaccttaaccagtatctgaagtctgttactttttttccattcttaaatggagatgaataagtgaatttcgccttaagtgtttcaattgtcctttgtagaaaagccagataaatgagttcactttgaattgcattattgtggaaaattcattttcagaataaaacattttaaaaagtacagctaatcgactaataaaatttaaatttg

SEQ ID NO: 270 - protein, 771 aa, Homo sapiens
MSGFFTSLDPRRVQWGAAWYAMHSRILRTKPVESMLEGTGTTTAHGTKLAQVLTTVDLISLGVGSCVGTGMYVVSGLVAKEMAGPGVIVSFIIAAVASILSGVCYAEFGVRVPKTTGSAYTYSYVTVGEFVAFFIGWNLILEYLIGTAAGASALSSMFDSLANHTISRWMADSVGTLNGLGKGEESYPDLLALLIAVIVTIIVALGVKNSIGFNNVLNVLNLAVWVFIMIAGLFFINGKYWAEGQFLPHGWSGVLQGAATCFYAFIGFDIIATTGEEAKNPNTSIPYAITASLVICLTAYVSVSVILTLMVPYYTIDTESPLMEMFVAHGFYAAKFVVAIGSVAGLTVSLLGSLFPMPRVIYAMAGDGLLFRFLAHVSSYTETPVVACIVSGFLAALLALLVSLRDLIEMMSIGTLLAYTLVSVCVLLLRYQPESDIDGFVKFLSEEHTKKKEGILADCEKEACSPVSEGDEFSGPATNTCGAKNLPSLGDNEMLIGKSDKSTYNVNHPNYGTVDMTTGIEADESENIYLIKLKKLIGPHYYTMRIRLGLPGKMDRPTAATGHTVTICVLLLFILMFIFCSFIIFGSDYISEQSWWAILLVVLMVLLISTLVFVILQQPENPKKLPYMAPCLPFVPAFAMLVNIYLMLKLSTITWIRFAVWCFVGLLIYFGYGIWNSTLEISAREEALHQSTYQRYDVDDPFSVEEGFSYATEGESQEDWGGPTEDKGFYYQQMSDAKANGRTSSKAKSKSKHKQNSEALIANDELDYSPE

SEQ ID NO: 271 - DNA, 939 bp, Homo sapiens
atggaagcagaaaaccttacagaattatcaaaatttctcctcctgggactctcagatgatcctgaactgcagcccgtcctctttgggctgttcctgtccatgtacctggtcacggtgctggggaacctgctcatcattctggccgtcagctctgactcccacctccacacccccatgtacttcttcctctccaacctgtcctttgttgacatctgtttcatctccaccacagtccccaagatgctagtgagcatccaggcacggagcaaagacatctcctacatggggtgcctcactcaggtgtattttttaatgatgtttgctggaatggatactttcctactggccgtgatggcctatgaccggtttgtggccatctgccacccactgcactacacggtcatcatgaacccctgcctctgtggcctcctggttctggcatcttggttcatcattttctggttctccctggttcatattctactgatgaagaggttgaccttctccacaggcactgagattccgcatttcttctgtgaaccggctcaggtcctcaaggtggcctgctctaacaccctcctcaataacattgtcttgtatgtggccacggcactgctgggtgtgtttcctgtagctgggatcctcttctcctactctcagattgtctcctccttaatgggaatgtcctccaccaagggcaagtacaaagccttttccacctgtggatctcacctctgtgtggtctccttgttctatggaacaggacttggggtctatctgagttctgctgtgacccattcttcccagagcagctccaccgcctcagtgatgtacgccatggtcacccccatgctgaaccccttcatctacagcctgaggaacaaggatgtgaagggggccctggaaagactcctcagcagggccgactcttgtccatga

SEQ ID NO: 272 - protein, 312 aa, Homo sapiens
MEAENLTELSKFLLLGLSDDPELQPVLFGLFLSMYLVTVLGNLLIILAVSSDSHLHTPMYFFLSNLSFVDICFISTTVPKMLVSIQARSKDISYMGCLTQVYFLMMFAGMDTFLLAVMAYDRFVAICHPLHYTVIMNPCLCGLLVLASWFIIFWFSLVHILLMKRLTFSTGTEIPHFFCEPAQVLKVACSNTLLNNIVLYVATALLGVFPVAGILFSYSQIVSSLMGMSSTKGKYKAFSTCGSHLCVVSLFYGTGLGVYLSSAVTHSSQSSSTASVMYAMVTPMLNPFIYSLRNKDVKGALERLLSRADSCP

SEQ ID NO: 273 - DNA, 2872 bp, Homo sapiens
aggaacaggccgcacacaacagcattccctggcagtaccaccatgccaggcgtcagtcaggaatctacagcttcccacagcagcccaggctccacagacacaacactgtcccctggcagtaccacagcatcatcccttggtccagaatctactaccttccacagcggcccaggctccactgaaacaacactcttacctgacaacaccacagcctccggcctccttgaagcatctacgcccgtccacagcagcactggatcgccacacacaacactgtcccctgccggctctacaacccgtcagggagaatctaccaccttccagagctggcctaactcgaaggacactacccctgcacctcctactaccacatcagcctttgttgagctatctacaacctcccacggcagcccgagctcaactccaacaacccacttttctgccagctccacaaccttgggccgtagtgaggaatcgacaacagtccacagcagcccagttgcaactgcaacaacaccctcgcctgcccgctccacaacctcaggcctcgttgaagaatctacgacctaccacagcagcccgggctcaactcaaacaatgcacttccctgaaagcgacacaacttcaggccgtggtgaagaatcaacaacttcccacagcagcacaacacacacaatatcttcagctcctagcaccacatctgcccttgttgaagaacctaccagctaccacagcagcccgggctcaactgcaacaacacacttccctgacagctccacaacctcaggccgtagtgaggaatcaacagcatcccacagcaaccaagacgcaacgggaacaatagtcctacctgcccgctccacaacctcagttcttcttggagaatctacgacctcacccatcagttcaggctcaatggaaacgacagcgttacccggcagtaccacaacgccaggcctcagtgagaaatctaccactttccacagtagccccagatcaccagccacaacactctcacctgccagcacgacaagctcaggcgtcagtgaagaatccaccacctcccacagccgaccaggctcaacgcacacaacagcattccctgacagcaccaccacgccaggcctcagtcggcattctacaacttcccacagcagcccaggctcaacggatacaacactgttacctgccagcaccaccacctcaggccccagtcaggaatcaacaacttcccacagcagcccaggttcaactgacacagcactgtcccctggcagtaccacagccttatcctttggtcaagaatctacaaccttccacagcagcccaggctccactcacacaacactcttccctgacagcaccacaagctcaggcatcgttgaagcatctacacgcgtccacagcagcactggctcaccacgcacaacactgtcccctgccagctccacaagccctggacttcagggagaatctaccgccttccagacccacccagcctcaactcacacgacgccttcaactcctagcaccgcaacagcccctgttgaagaatctacaacctaccaccgcagcccaagctcgactccaacaacacacttccctgccagctccacaacttcgggccacagtgagaaatcaacaatattccacagcagcccagatgcaagtggaacaacaccctcatctgcccactccacaacctcaggtcgtggagaatctacaacctcacgcatcagtccaggctcaactgaaataacaacgttacctggcagtaccacaacaccaggcctcagtgaggcatctaccaccttctacagcagccccagatcaccaaccacaacactctcacctgccagcatgacaagcctaggcgtcggtgaagaatccaccacctcccgtagccaaccaggttctactcactcaacagtgtcacctgccagcaccaccacgccaggcctcagtgaggaatctaccaccgtctacagcagcagcccaggctcaactgaaaccacagtgttccctcgcagcaccacaacctcagttcgtggtgaagagcctacaaccttccacagccggccagcctcaactcacacaacactgttcactgaggacagcaccacctcgggcctcactgaagaatctacagccttccccggcagcccagcctccacccaaacagggttacctgccacactcacaaccgcagacctcggtgaggaatcaactacctttcccagcagctcaggctcaactggaacaacactctcacctgcccgctccaccacctctggcctcgttggagaatccacaccctcacgcctcagtccaagctcaaccgaaacaacaactttacccggcagtcccacaacaccaagcctcagtgagaaatcaaccaccttctacactagccccagatcaccagatgcaacactctcacctgcaaccacaacaagctcaggcgtcagcgaagaatccagcacatcccacagtcaaccaggctcaacgcacacaacagcgttccctgacagcaccaccacctcaggcctcagtcaggaacctaaaacttcccacagcagccaaggctcaacagaggcaacactgtcccctggcagtaccacagcctcatcccttggtcaacaatctacaaccttccacagcagcccaggcgacactgaaaccacactcttacctgatgacaccataacctcaggcctcgtggaggcatctacacccacccacagcagcactggctcgctacacacaacactgacccctgccagctccacaagcgctggccttcaggaagaatctactactttccagagctggccaagctcaagtgacacaacaccttcacctcccggcccgg

SEQ ID NO: 274 - protein, 957 aa, Homo sapiens
RNRPHTTAFPGSTTMPGVSQESTASHSSPGSTDTTLSPGSTTASSLGPESTTFHSGPGSTETTLLPDNTTASGLLEASTPVHSSTGSPHTTLSPAGSTTRQGESTTFQSWPNSKDTTPAPPTTTSAFVELSTTSHGSPSSTPTTHFSASSTTLGRSEESTTVHSSPVATATTPSPARSTTSGLVEESTTYHSSPGSTQTMHFPESDTTSGRGEESTTSHSSTTHTISSAPSTTSALVEEPTSYHSSPGSTATTHFPDSSTTSGRSEESTASHSNQDATGTIVLPARSTTSVLLGESTTSPISSGSMETTALPGSTTTPGLSEKSTTFHSSPRSPATTLSPASTTSSGVSEESTTSHSRPGSTHTTAFPDSTTTPGLSRHSTTSHSSPGSTDTTLLPASTTTSGPSQESTTSHSSPGSTDTALSPGSTTALSFGQESTTFHSSPGSTHTTLFPDSTTSSGIVEASTRVHSSTGSPRTTLSPASSTSPGLQGESTAFQTHPASTHTTPSTPSTATAPVEESTTYHRSPSSTPTTHFPASSTTSGHSEKSTIFHSSPDASGTTPSSAHSTTSGRGESTTSRISPGSTEITTLPGSTTTPGLSEASTTFYSSPRSPTTTLSPASMTSLGVGEESTTSRSQPGSTHSTVSPASTTTPGLSEESTTVYSSSPGSTETTVFPRSTTTSVRGEEPTTFHSRPASTHTTLFTEDSTTSGLTEESTAFPGSPASTQTGLPATLTTADLGEESTTFPSSSGSTGTTLSPARSTTSGLVGESTPSRLSPSSTETTTLPGSPTTPSLSEKSTTFYTSPRSPDATLSPATTTSSGVSEESSTSHSQPGSTHTTAFPDSTTTSGLSQEPKTSHSSQGSTEATLSPGSTTASSLGQQSTTFHSSPGDTETTLLPDDTITSGLVEASTPTHSSTGSLHTTLTPASSTSAGLQEESTTFQSWPSSSDTTPSPPGP

SEQ ID NO: 275 - DNA, 1757 bp, Homo sapiens
gatacccccatgagagctgccctaaaagcagagaggcagcgtgatggagaggttcagcacatgctctctgatcccaggaatcctgggtatggtgtttcgtatctgtgtgacctcaggctggagtgcaatggcacgatctcggctcactgcaatctctgcctccctggttcaagcaattctcctgcctcagcctcccgagtagctgtgactacaggcacacgccaccatgcccggataatattttttgtatgttagtagagacggggtttcactgtgttgccaaagctggtcttgaactcctgagttcaggcaatccacctgcctcagcctctgaaagtgctaggattacaggcgtgacccactgcgcccggtctttctttttttgttgttgttggttttttatcttaacttttcttttttctgttgatgcttttcaagaattactgccttagaagaaagcaggcaatttatgaggaaaaattacaaactatcacgtgtcacaaaacctatattcaaggacttccaaaaaagccagaagatgaaattgctagttcaaagttgttggattgctagtcatgtcatgaggatcagaaggttgagatttttgtagaagcttagaccagtgtgatagtagtgattggatcaagacgtttgcaaaagggactaagctcatagtaacttcgcctgataaacaacttgatgcagatgtttcccccaagcccactatttttcttccttcaattgctgaaacaaaactccagaaggctggaacatacctttgtcttcttgagaaatttttcccagatattattaagatacattggcaagaaaagaagagcaacacgattctgggatcccaggaggggaacaccatgaagactaacgacacatacatgaaatttagctggttaacggtgccagaagagtcactggacaaagaacacagatgtatcgtcagacatgagaataataaaaacggaattgatcaagaaattatctttcctccaataaagacagatgtcaccacagtggatcccaaagacagttattcaaaagatgcaaatgatgtcaccacagtggatcccaaatacaattattcaaaggatgcaaatgatgtcatcacaatggatcccaaagacaattggtcaaaagatgcaaatgatacactactgctgcagctcacaaacacctctgcatattacatgtacctcctcctgctcctcaagagtgtggtctattttgccatcatcacctgctgtctgcttagaagaacggctttctgctgcaatggagagaaatcataacagacggtggcacaaggaggccatcttttcctcatcggttattgtccctagaagcgtcttctgaggatctagttgggctttctttctgggtttgggccatttcagttctcatgtgtgtactattctatcattattgtataatggttttcaaaccagtgggcacacagagaacctcactctgtaataacaatgaggaatagccatggcgatctccagcaccaatctctccatgttttccacagctcctccagccaacccaaatagcgcctgctatagtgtagacagcctgcggcttctagccttgtccctctcttagtgttctttaatcagataactgcctggaagcctttcattttacacgccctgaagcagtcttctttgctagttgaattatgtggtgtgtttttccgtaataagcaaaataaatttaaaaaaatgaaaaaaaaaaaaaaa

SEQ ID NO: 276 - protein, 204 aa, Homo sapiens
KQLDADVSPKPTIFLPSIAETKLQKAGTYLCLLEKFFPDIIKIHWQEKKSNTILGSQEGNTMKTNDTYMKFSWLTVPEESLDKEHRCIVRHENNKNGIDQEIIFPPIKTDVTTVDPKDSYSKDANDVTTVDPKYNYSKDANDVITMDPKDNWSKDANDTLLLQLTNTSAYYMYLLLLLKSVVYFAIITCCLLGRTAFCCNGEKS

SEQ ID NO: 277 - DNA, 264 bp, Homo sapiens
atgagactccatttgcttctccttattctccttcttttttcaattctcttatccccagtaagaggtggtttgggtcctgcggaaggtcattgtctcaatttgtttggtgtttgcagaacagatgtctgcaacatagtagaagatcaaattggtgcctgccgaagaaggatgaagtgctgtagagcatggtggattttaatgccaattccaacaccacttatcatgtcagattatcaagaaccccttaaacctaacttgaaatga

SEQ ID NO: 278 - protein, 87 aa, Homo sapiens
MRLHLLLLILLLFSILLSPVRGGLGPAEGHCLNLFGVCRTDVCNIVEDQIGACRRRMKCCRAWWILMPIPTPLIMSDYQEPLKPNLK

SEQ ID NO: 279 - DNA, 2053 bp, Homo sapiens
caggcagcaggcagcaggcgggcgcgctgtggctccgcgccgcgcggtccgggctctgttcattcatgattggtactcggccctccgagacccagcccgagcgcagggaggggagccgagtgtgcggcaggaggggcgggcggacggcggctcccgcaccgcacgcggcgctggctcggcagcctcggccgggcggccgctctggccccgtgtccagtgccaggcaggcttcagggcaccgtcctcggccctgggcgagggaaccgccgggccgggtcctcgcgcggggaagcggttccgaaggctcgcggggagcggctagccctgagtccctgcatgtgcggggctgaagaaggaagccagaagcctcctagcctcgcctccacgcttgctgaataccaagctgcaggcgagctgccgggcgcttttctctcctccaattcagagtagacaaaccacggggatttctttccagggtaggggaggggccgggcccggggtcccaactcgcactcaagtcttcgctgccatgggggccgtcatgggcaccttctcatctctgcaaaccaaacaaaggcgaccctcgaaagacatcgcctggtggtattaccagtatcagagagataagattgaagatgagctggagatgaccatggtttgccatcggcccgagggactggagcagctcgaggcccagaccaacttcaccaagagggagctgcaggtcctttatcgaggcttcaaaaatgagtgccccagtggtgtggtcaacgaagacacattcaagcagatctatgctcagtttttccctcatggagatgccagcacgtatgcccattacctcttcaatgccttcgacaccactcagacaggctccgtgaagttcgaggactttgtaaccgctctgtcgattttattgagaggaactgtccacgagaaactaaggtggacatttaatttgtatgacatcaacaaggacggatacataaacaaagaggagatgatggacattgtcaaagccatctatgacatgatggggaaatacacatatcctgtgctcaaagaggacactccaaggcagcatgtggacgtcttcttccagaaaatggacaaaaataaagatggcatcgtaactttagatgaatttcttgaatcatgtcaggaggacgacaacatcatgaggtctctccagctgtttcaaaatgtcatgtaactggtgacactcagccattcagctctcagagacattgtactaaacaaccaccttaacaccctgatctgcccttgttctgattttacacaccaactcttgggacagaaacaccttttacactttggaagaattctctgctgaagactttctatggaacccagcatcatgtggctcagtctctgattgccaactcttcctctttcttcttcttgagagagacaagatgaaatttgagtttgttttggaagcatgctcatctcctcacactgctgccctatggaaggtccctctgcttaagcttaaacagtagtgcacaaaatatgctgcttacgtgcccccagcccactgcctccaagtcaggcagaccttggtgaatctggaagcaagaggacctgagccagatgcacaccatctctgatggcctcccaaaccaatgtgcctgtttctcttcctttggtgggaagaatgagagttatccagaacaattaggatctgtcatgaccagattgggagagccagcacctaacatatgtgggataggactgaattattaagcatgatattgtctgatgacccaaactgcccatgtcatttgtttccagaaacgaggaccaataattctctcacactggcatttgtgctggtagtacaagtcctttaatatgtccaggaagggagccattgcccagtggtccatatctccaccacatcccctgcttgagcccagcgctgcatgtccctcccaagaagtccagaatgcctgcaaattgctgtaattttataccatgttctaaccaataaacagaactatttcttacactctcaaaaaaaaaaaaaaaa

SEQ ID NO: 280 - protein, 227 aa, Homo sapiens
MGAVMGTFSSLQTKQRRPSKDIAWWYYQYQRDKIEDELEMTMVCHRPEGLEQLEAQTNFTKRELQVLYRGFKNECPSGVVNEDTFKQIYAQFFPHGDASTYAHYLFNAFDTTQTGSVKFEDFVTALSILLRGTVHEKLRWTFNLYDINKDGYINKEEMMDIVKAIYDMMGKYTYPVLKEDTPRQHVDVFFQKMDKNKDGIVTLDEFLESCQEDDNIMRSLQLFQNVM

SEQ ID NO: 281 - DNA, 1541 bp, Homo sapiens
gaagagctagctttggagtgttgtttttctcactctcaggcaggggccttagctggaatcctccaacctgccactgaacacgtcagtgctgtgtgctgcctcttggacacctgcccttgaaagcctcaggcccctgggagaagcactctgtccagtcctgtccccgggggggaggcagggccactgagccctcctcagatggttagtggcttccaacagccatcaggagtgtttcttgaatgccccaggtgtggaggacttggtctgtgaccacctagaaccccagagctgaacaggaagccgtccctgcagcaacaagagggctggaagggggagctgcaggccaccctcggctctcccactgctggggcggtgatgttcgggtgacatgtttgaaaaatactcttaaagataccaactgttcccttatatggctaatggtttgtgcagccaccagcgatggcggcccctattagagaccaggtttgttaaaacaccaaatattgctgtccacactagacattaaccggcttcagaaaagatggacaccttttcccacgctgtttcgcttcttaactttggtccagctttagccaccacacagcgtgtgagggactgctgctgcggagtcagcctcgtttgtccctccgcctcccaccagcacgcgccgcttctgagagacaccagctccctgcctccaagcctggtgccacaggcctgtcgtgagggacccctgcttccgagagctcctgggggggttctgcccttcaccacctgggagaggtgtcagttcagttccgagttgaacaaggcccgtgcacacagcatgttgggggcccagcccaaagttcttgtcacctcctcatgcaaagccagccatcaccctccggccagagctcaaggtggccccttggccagcccctccttgggtcctccaggaggactgagcacccctcctagcggcatcccttgccctccacagtgctgccaggggcacgtcgctctgtgccgtggactgagaccatcccctggtgacagaatgacccgtttgttggaaatgcctcgttgccagagaaactccccaggcatctcggaacgaaactatttagttccattgtgaactggccacgggacagctttttatcaacttattaagttggagcactgtaatcgcgcttgctgagttagcagtggtggtaagcgtgtgttaaacacataatgttacgttttaggagagagaggtcgtaaggaagtgtcgtgtcgctcatgactctcttctattagttgggtaacagtggcctcatgtttgtgtctgtgtgtacacagagcccttaggttctgctctgtttctttgccaggtgaatgtttgtggcatgcgctgctgtccgcgcccctctgtcctgcgcagggttcagctgtgcggcgccctgatttcctccatgcacacagaacctccttgtgtctgtttctctgttcctctgtggctgactcaataaacttttccctctgaaaaaaaaaaaaaaaaaaaaaaaaaaaaaaaa

SEQ ID NO: 282 - protein, 192 aa, Homo sapiens
MDTFSHAVSLLNFGPALATTQRVRDCCCGVSLVCPSASHQHAPLLRDTSSLPPSLVPQACREGPLLPRAPGGVLPFTTWERCQFSSELNKARAHSMLGAQPKVLVTSSCKASHHPPARAQGGPLASPSLGPPGGLSTPPSGIPCPPQCCQGHVALCRGLRPSPGDRMTRLLEMPRCQRNSPGISERNYLVPL

SEQ ID NO: 283 - DNA, 3936 bp, Homo sapiens
aaattctgcaagtgaacttgactcaggaaggccagcggctcaaggtccagcccctggaagagagaatagctacagattctccatcctcagtctttgcaaggcgacagctgtgccagccgggctctggcaggctcctggcagcatggcagtgaagcttgggaccctcctgctggcccttgccctgggcctggcccagccagcctctgcccgccggaagctgctggtgtttctgctggatggttttcgctcagactacatcagtgatgaggcgctggagtcattgcctggtttcaaagagattgtgagcaggggagtaaaagtggattacttgactccagacttccctagtctctcgtatcccaattattataccctaatgactggccgccattgtgaagtccatcagatgatcgggaactacatgtgggaccccaccaccaacaagtcctttgacattggcgtcaacaaagacagcctaatgcctctctggtggaatggatcagaacctctgtgggtcactctgaccaaggccaaaaggaaggtctacatgtactactggccaggctgtgaggttgagattctgggtgtcagacccacctactgcctagaatataaaaatgtcccaacggatatcaattttgccaatgcagtcagcgatgctcttgactccttcaagagtggccgggccgacctggcagccatataccatgagcgcattgacgtggaaggccaccactacgggcctgcatctccgcagaggaaagatgccctcaaggctgtagacactgtcctgaagtacatgaccaagtggatccaggagcggggcctgcaggaccgcctgaacgtcattattttctcggatcacggaatgaccgacattttctggatggacaaagtgattgagctgaataagtacatcagcctgaatgacctgcagcaagtgaaggaccgcgggcctgttgtgagcctttggccggcccctgggaaacactctgagatatataacaaactgagcacagtggaacacatgactgtctacgagaaagaagccatcccaagcaggttctattacaagaaaggaaagtttgtctctcctttgactttagtggctgatgaaggctggttcataactgagaatcgagagatgcttccgttttggatgaacagcaccggcaggcgggaaggttggcagcgtggatggcacggctacgacaacgagctcatggacatgcggggcatcttcctggccttcggacctgatttcaaatccaacttcagagctgctcctatcaggtcggtggacgtctacaatgtcatgtgcaatgtggtgggcatcaccccgctgcccaacaacggatcctggtccagggtgatgtgcatgctgaagggccgcgccagcactgccccgcctgtctggcccagccactgtgccctggcactgattcttctcttcctgcttgcataactgatcatattgcttgtctcagaaaaaaacaccatcagcaaagtgggcctccaaagccagatgattttcattttatgtgtgaataatagcttcattaacacaatcaagaccatgcacattgtaaatacattattcttggataattctatacataaaagttcctacttgttaaaaaagatacaaaccttgtttttccagaaggtaggaaaatcctagctttccatttgtgcagttatatgtcattttctcctttcttttcacgttactcaggatgaactctctgagcagggacctgctcctgcagcaaccaaacttggagtggttattgcagacagacgtggctctgggcccctctctgtcccaccttgcacaaaggaccccctcagaccaggcccttgtctgtgccctgtccacacccaggagccatcctcagtgtctgtggccacaatcctgtactgttccttccatccctgataaaaggaggtctacatgaaagcaaaagctactgtctatttctgacccagctcatggaattttttcatcttatactgagctccagaaaggacgtaacttagcatggatcaccaatcaatcaaaaaataaataaatcactaaggattggagaactcatagaacaaggtgaaagacatgagtgccctcccaaagtctgagtgcacgaaaatttctctcttgccttgaggagcagaaaagcttctgatggacatgggcttctgtgagacttatcacacatagtgtatcgtggcatgaagcccggcacatagcaggccctgcatattgatggacaaatggatggcctgcctgccttccctgtccgttcacctgtgcaaaggcttcctcagacatgccactctgtggctcccaatatagggtgcagacaagagcaatccctgacatgacattatagcctgggaaagggctggctcactgatgagaatgtggaggcatcagcaaggatctcggtgggttgctcagagaggtgatgcactaagccttaatcctggacaccagtacccctgcagcatggcttgctcaacaacagtctttgagtggcatagaattccaaagaaaatggtgctgggtggagaatggagagagcatgatggagcagagtcccagtcactgaccaactaactggtcgtttgattaggaaacagtttggccaaagtaccacctttgagacctaagttcttttgatacctttgagaagagccactgagcctgagttgaaatatttttagcttagtcatctgtgtttgctataggagaaattgtaacacaagaaataactcctttttacatgatcatttatatctatatacatatatatacttgcatacactatcactgcattaaaaaatgagtttgggctgggcatggtggctcacacctataatcccaacactttcggaggccaaggagggacaaacgaacccttgaggccaggagttccagactaacttgggcaacacagggcgacccccatctctacaaaacataaaagatttttaaaaaattagccaggcatggtggcacatgcctgtggtctcagctacttgggaggctgaggcaggagaatcatttgagcccaggaggtcaaggctgcagtgagctttgatcacaccactgcactccagcctgggcaacagagcaagaccccatcctccaccccccccaaaaaatagaaagaaaaaaaaagtttgcactaattgaggtacatctgcaagtgagactttttgtcaggaaaaggcaatatatcaggtctcctcaggacgatggaggccttatatggtgtgttaccttgaaaactgaatatcaacgttcaccttgattcaggaaagctgggtgctgtctccatgccatgaatcatgagagcaaaggatcactgcttaaaaatactgaatttaccttcacaaaagatttctaaagatttatgtaatgtgttttaaaagcgccagtaaaccatcggatcaattggaaagaaggcaactcttcagcctttgttatctagctgaaaacaaatgacaactttcaaaacattggcagtagttgttgaaaaagacgtctattgttcaaagtttctttctccttaaaggacggtgttccaatgaattcagtagagcccactttcctccactgtggaggaagaatccctaagagatactcaaatgattaaattaaaattggatcatcaaactcaagagaggcataaacttagacacagtcttgcatttttgtctttcctgaactcttctgccattttcctccttcactcgtcctgaaaatctgcaagttacataataaaactttagatatttgtctgacaaagtgtaattactcaactgaataaatgactgagaacaagttacaaaaggaatcatgaatcctggtaaacaataaagaagattcagacactgagggaaaaaaataaagctttttacttaaataatgca

SEQ ID NO: 284 - protein, 440 aa, Homo sapiens
MAVKLGTLLLALALGLAQPASARRKLLVFLLDGFRSDYISDEALESLPGFKEIVSRGVKVDYLTPDFPSLSYPNYYTLMTGRHCEVHQMIGNYMWDPTTNKSFDIGVNKDSLMPLWWNGSEPLWVTLTKAKRKVYMYYWPGCEVEILGVRPTYCLEYKNVPTDINFANAVSDALDSFKSGRADLAAIYHERIDVEGHHYGPASPQRKDALKAVDTVLKYMTKWIQERGLQDRLNVIIFSDHGMTDIFWMDKVIELNKYISLNDLQQVKDRGPVVSLWPAPGKHSEIYNKLSTVEHMTVYEKEAIPSRFYYKKGKFVSPLTLVADEGWFITENREMLPFWMNSTGRREGWQRGWHGYDNELMDMRGIFLAFGPDFKSNFRAAPIRSVDVYNVMCNVVGITPLPNNGSWSRVMCMLKGRASTAPPVWPSHCALALILLFLLA

SEQ ID NO: 285 - DNA, 2592 bp, Homo sapiens
aaaaagcagcagaacctggaagtccacggggagcttggatgccaaagggaggacggctgggtcctctggagaggactactcactggcatatttctgaggtatctgtagaaaaccacagcctcagatactggggactttacagtcccacagaaccgtcctcccaggaagctgaattcagcaagaacaatggaggccagcgggaagctcatttgcagacaaaggcaagtccttttttcctttctccttttgggcttatctctggcgggcgcggcggaacctagaagctattctgtggtggaggaaactgagggcagctcctttgtcaccaatttagcaaaggacctgggtctggagcagagggaattctccaggcggggggttagggttgtttccagagggaacaaactacatttgcagctcaatcaggagaccgcggatttgttgctaaatgagaaattggaccgtgaggatctgtgcggtcacacagagccctgtgtgctacgtttccaagtgttgctagagagtcccttcgagttttttcaagctgagctgcaagtaatagacataaacgaccactctccagtatttctggacaaacaaatgttggtgaaagtatcagagagcagtcctcctgggactgcgtttcctctgaagaatgctgaagacttagatataggccaaaacaatattgagaactatataatcagccccaactcctattttcgggtcctcacccgcaaacgcagtgatggcaggaaatacccagagctggtgctggacaacgcgctggaccgagaggaagaagctgagctcaggttaacactcacagcactggatggtggctctccgcccagatctggcactgctcaggtctacattgaagttgtcgatgtcaatgataatgcccctgaatttcagcagcctttctatagggtgcagatctctgaggacagtccaataagcttcctggttgtgaaggtctctgccacggatgtagacacaggagtcaacggagagatttcctattcacttttccaagcttcagatgagataagcaaaacttttaaggtcgatttcttgacaggagaaattcgactaaagaaacaacttgatttcgaaaaatttcagtcctatgaagtcaatatcgaggcgagagatgctggaggcttttctggaaaatgcaccgttctgattcaagtgatagatgtgaacgaccatgccccagaagttaccatgtctgcatttaccagcccaatacctgagaatgcgcctgaaactgtggttgcacttttcagtgtttcagaccttgattcaggagaaaatgggaaaataagttgctccattcaggaggatctacccttcctcctgaaatcttctgtggggaacttttacaccctactaacagagacaccactagacagagaaagcagagccgagtacaacgtcactatcaccgtcactgacttagggacacccaggctgacaacacatctcaatatgaccgtgctggtgtcggacgtcaatgacaacgcccccgccttcacccaaacctcctacaccctgttcgtccgcgagaacaacagccccgccctgcacatcggcagcgtcagcgccacagacagagactcgggcaccaacgcccaggtcacctactcgctgctgccgccccaggatccgcacctgcccctcgcctccctggtctccatcaacacagacaacggccacctgttcgccctcaggtcgctggactacgaggccctgcaggcgttcgagttccgggtgggcgcttcagaccgcggctccccggctttgagcagcgaggcgctggtgcgcgtgctggtgctggacgccaacgacaactcgcccttcgtgctgtacccgctgcagaatggctccgcgccctgcaccgagctggtgccccgggcggccgagccgggctacctggtgaccaaggtggtggcggtggacggcgactcgggccagaacgcctggctgtcgtaccagctgctcaaggccacggagcccgggctgttcggtgtgtgggcgcacaatggcgaggtgcgcaccgccaggctgctgagcgagcgcgacgcggccaagcagaggctggtggtgctggtcaaggacaatggcgagcctccgtgctcggccaccgccacgctgcacttgctcctggtggacggcttctcccagccctacctgccgcttccggaggctgccccagcccagggccaggccgactctctcaccgtctacctggtggtggcgttggcctcggtgtcttcgctcttcctcttctcggtgctcctgttcgtggcggtgctgctgtgtaggaggagcagggcggcctcggtgggtcgctgctcagtgcctgagggcccctttccagggcatctggtggacgtgaggggcaccgggagcctgtctcagaactatcagtacgaggtgtgcctggcaggaggctcagggacgaatgagttccagttcctgaaaccagtattacctaatattcagggccattcttttgggccagaaatggaacaaaactctaactttaggaatggctttggtttcagccttcagttaaagtaa

SEQ ID NO: 286 - protein, 801 aa, Homo sapiens
MEASGKLICRQRQVLFSFLLLGLSLAGAAEPRSYSVVEETEGSSFVTNLAKDLGLEQREFSRRGVRVVSRGNKLHLQLNQETADLLLNEKLDREDLCGHTEPCVLRFQVLLESPFEFFQAELQVIDINDHSPVFLDKQMLVKVSESSPPGTAFPLKNAEDLDIGQNNIENYIISPNSYFRVLTRKRSDGRKYPELVLDNALDREEEAELRLTLTALDGGSPPRSGTAQVYIEVVDVNDNAPEFQQPFYRVQISEDSPISFLVVKVSATDVDTGVNGEISYSLFQASDEISKTFKVDFLTGEIRLKKQLDFEKFQSYEVNIEARDAGGFSGKCTVLIQVIDVNDHAPEVTMSAFTSPIPENAPETVVALFSVSDLDSGENGKISCSIQEDLPFLLKSSVGNFYTLLTETPLDRESRAEYNVTITVTDLGTPRLTTHLNMTVLVSDVNDNAPAFTQTSYTLFVRENNSPALHIGSVSATDRDSGTNAQVTYSLLPPQDPHLPLASLVSINTDNGHLFALRSLDYEALQAFEFRVGASDRGSPALSSEALVRVLVLDANDNSPFVLYPLQNGSAPCTELVPRAAEPGYLVTKVVAVDGDSGQNAWLSYQLLKATEPGLFGVWAHNGEVRTARLLSERDAAKQRLVVLVKDNGEPPCSATATLHLLLVDGFSQPYLPLPEAAPAQGQADSLTVYLVVALASVSSLFLFSVLLFVAVLLCRRSRAASVGRCSVPEGPFPGHLVDVRGTGSLSQNYQYEVCLAGGSGTNEFQFLKPVLPNIQGHSFGPEMEQNSNFRNGFGFSLQLK

SEQ ID NO: 287 - DNA, 957 bp, Homo sapiens
atgtgctcagggaatcagacttctcagaatcaaacagcaagcactgatttcaccctcacgggactctttgctgagagcaagcatgctgccctcctctacaccgtgaccttccttcttttcttgatggccctcactgggaatgccctcctcatcctcctcatccactcagagccccgcctccacacccccatgtacttcttcatcagccagctcgcgctcatggatctcatgtacctatgcgtgactgtgcccaagatgcttgtgggccaggtcactggagatgataccatttccccgtcaggctgtgggatccagatgttcttctacctgaccctggctggagctgaggttttcctcctggctgccatggcctatgaccgatatgctgctgtttgcagacctctccattacccactgctgatgaaccagagggtgtgccagctcctggtgtcagcctgctgggttttgggaatggttgatggtttgttgctcacccccattaccatgagcttccccttttgccagtctaggaaaatcctgagttttttctgtgagactcctgccctgctgaagctctcctgctctgacgtctccctctataagacgctcatgtacctgtgctgcatcctcatgcttctcgcccccatcatggtcatctccagctcatacaccctcatcctgcatctcatccacaggatgaattctgccgccggccacaggaaggccttggccacctgctcctcccacatgatcatagtgctgctgctcttcggtgcttccttctacacctacatgctcccgagttcctaccacacagctgagcaggacatgatggtgtctgccttttacaccatcttcactcctgtgctgaaccccctcatttacagtctccgcaacaaagatgtcaccagggctctgaggagcatgatgcagtcaagaatgaaccaagaaaagtag

SEQ ID NO: 288 - protein, 318 aa, Homo sapiens
MCSGNQTSQNQTASTDFTLTGLFAESKHAALLYTVTFLLFLMALTGNALLILLIHSEPRLHTPMYFFISQLALMDLMYLCVTVPKMLVGQVTGDDTISPSGCGIQMFFYLTLAGAEVFLLAAMAYDRYAAVCRPLHYPLLMNQRVCQLLVSACWVLGMVDGLLLTPITMSFPFCQSRKILSFFCETPALLKLSCSDVSLYKTLMYLCCILMLLAPIMVISSSYTLILHLIHRMNSAAGHRKALATCSSHMIIVLLLFGASFYTYMLPSSYHTAEQDMMVSAFYTIFTPVLNPLIYSLRNKDVTRALRSMMQSRMNQEK

SEQ ID NO: 289 - DNA, 948 bp, Homo sapiens
atgttgtccccaaaccacaccatagtgacagaattcattctcttaggactgacagacgacccagtgctagagaagatcctgtttggggtgttcctggcgatctacctaatcacactggcaggcaacctgtgcatgatcctgctgatcaggaccaattcccaactgcaaacacccatgtatttcttccttggtcacctctcctttgtagacatttgctattcttccaatgttactccaaatatgctgcacaatttcctctcagaacagaagaccatctcctacgctggatgcttcacacagtgtcttctcttcatcgccctagtgatcactgagttttacttccttgcttcaatggcattggatcgctatgtagccatttgcagccctttacattacagttccaggatgtccaagaacatttgcatctctctggtcactgtgccttacatgtatggcttccttaatgggctctctcagacactgctgacctttcacttatccttctgtggctcccttgaaatcaatcatttctactgcgctgatcctcctcttatcatgctggcctgctctgacacccgtgtcaaaaagatggcaatgtttgtagttgcaggctttactctctcaagctctctcttcatcattcttctgtcctatcttttcatttttgcagcgatcttcaggatccgttctgctgaaggcaggcacaaagccttttctacgtgtgcttcccacctgacaatagtcactttgttttatggaaccctcttctgcatgtacgtaaggcctccatcagagaagtctgtagaggagtccaaaataattgcagtcttttatacttttttgagcccaatgctgaacccattgatctatagcctacggaacagagatgtaatccttgccatacaacaaatgattaggggaaaatccttttgtaaaattgcagtttag

SEQ ID NO: 290 - protein, 315 aa, Homo sapiens
MLSPNHTIVTEFILLGLTDDPVLEKILFGVFLAIYLITLAGNLCMILLIRTNSQLQTPMYFFLGHLSFVDICYSSNVTPNMLHNFLSEQKTISYAGCFTQCLLFIALVITEFYFLASMALDRYVAICSPLHYSSRMSKNICISLVTVPYMYGFLNGLSQTLLTFHLSFCGSLEINHFYCADPPLIMLACSDTRVKKMAMFVVAGFTLSSSLFIILLSYLFIFAAIFRIRSAEGRHKAFSTCASHLTIVTLFYGTLFCMYVRPPSEKSVEESKIIAVFYTFLSPMLNPLIYSLRNRDVILAIQQMIRGKSFCKIAV

SEQ ID NO: 291 - DNA, 930 bp, Homo sapiens
atgggtgccaagaacaatgtgactgagtttgttttatttggcctttttgagagcagagagatgcagcatacatgctttgtggtattcttcctctttcatgtgctcactgtcctggggaaccttctggtcatcatcaccatcaatgctagaaagaccctgaagtctcccatgtatttcttcctgagccagttgtcttttgctgacatatgttatccatccactaccatacccaagatgattgctgacacttttgtggagcataagatcatctccttcaatggctgcatgacccagctcttttctgcccacttctttggtggcactgagatcttcctccttacagccatggcctatgaccgctatgtggccatctgtaggcccctgcactacacagccatcatggattgccggaagtgtggcctgctagcgggggcctcctggttagctggcttcctgcattccatcctgcagaccctcctcacggttcagctgcctttttgtgggcccaatgagatagacaacttcttctgtgatgttcatcccctgctcaagttggcctgtgcagacacctacatggtaggtctcatcgtggtggccaacagcggtatgatttctttagcatccttttttatccttatcatttcctatgttatcatcttactgaacctaagaagccagtcatctgaggaccggcgtaaggctgtctccacatgtggctcacacgtaatcactgtccttttggttctcatgccccccatgttcatgtacattcgtccctccaccaccctggctgctgacaaacttatcatcctctttaacattgtgatgccacctttgctgaaccctttgatctatacactaaggaacaacgatgtgaaaaatgccatgaggaagctgtttagggtcaagaggagcttaggggagaagtga

SEQ ID NO: 292 - protein, 309 aa, Homo sapiens
MGAKNNVTEFVLFGLFESREMQHTCFVVFFLFHVLTVLGNLLVIITINARKTLKSPMYFFLSQLSFADICYPSTTIPKMIADTFVEHKIISFNGCMTQLFSAHFFGGTEIFLLTAMAYDRYVAICRPLHYTAIMDCRKCGLLAGASWLAGFLHSILQTLLTVQLPFCGPNEIDNFFCDVHPLLKLACADTYMVGLIVVANSGMISLASFFILIISYVIILLNLRSQSSEDRRKAVSTCGSHVITVLLVLMPPMFMYIRPSTTLAADKLIILFNIVMPPLLNPLIYTLRNNDVKNAMRKLFRVKRSLGEK

SEQ ID NO: 293 - DNA, 4300 bp, Homo sapiens
gtgccgaccgcgggctggtggcgggcggcgcggtgctccgcgcgtccgggctccctggctcctcgggacggccttgtatgctgtgcgccccgcaccccggctgcgcgctccgatcccagcgggaggggacgcccggcccgcaggctcccaggggaggggtggctcctgcaaaatggtccctcacctcttgctgctctgtctcctccccttggtgcgagccaccgagccccacgagggccgggccgacgagcagagcgcggaggcggccctggccgtgcccaatgcctcgcacttcttctcttggaacaactacaccttctccgactggcagaactttgtgggcaggaggcgctacggcgctgagtcccagaaccccacggtgaaagccctgctcattgtggcttactccttcatcattgtcttctcactctttggcaacgtcctggtctgtcatgtcatcttcaagaaccagcgaatgcactcggccaccagcctcttcatcgtcaacctggcagttgccgacataatgatcacgctgctcaacacccccttcactttggttcgctttgtgaacagcacatggatatttgggaagggcatgtgccatgtcagccgctttgcccagtactgctcactgcacgtctcagcactgacactgacagccattgcggtggatcgccaccaggtcatcatgcaccccttgaaaccccggatctcaatcacaaagggtgtcatctacatcgctgtcatctggaccatggctacgttcttttcactcccacatgctatctgccagaaattatttaccttcaaatacagtgaggacattgtgcgctccctctgcctgccagacttccctgagccagctgacctcttctggaagtacctggacttggccaccttcatcctgctctacatcctgcccctcctcatcatctctgtggcctacgctcgtgtggccaagaaactgtggctgtgtaatatgattggcgatgtgaccacagagcagtactttgccctgcggcgcaaaaagaagaagaccatcaagatgttgatgctggtggtagtcctctttgccctctgctggttccccctcaactgctacgtcctcctcctgtccagcaaggtcatccgcaccaacaatgccctctactttgccttccactggtttgccatgagcagcacctgctataaccccttcatatactgctggctgaacgagaacttcaggattgagctaaaggcattactgagcatgtgtcaaagacctcccaagcctcaggaggacaggccaccctccccagttccttccttcagggtggcctggacagagaagaatgatggccagagggctccccttgccaataacctcctgcccacctcccaactccagtctgggaagacagacctgtcatctgtggaacccattgtgacgatgagttagaagaggttgggaagagggagtgggaggggtctgtctccacctgaggcagggaaagagagcctattctcacacatgatcttcagagtgctggaaacacactcctgcagaagctgtaggactcttgaattcctaggaaactgtccagcctcctagccccatgtgatgtgaaaactaaaaggcaccaccaactagacatgtgttcataaattcccatctaagaaacactgggaggcacagcagcctgtatctctgaggaagaggagcgaggacaacgttggcccagatgggggctgaatcattcaactgcctccatctgtggggcagctgctgccttacagcccttcctactgctgagcatccctaagggagacctaaatcatactttgggtgtggtgacccagatgcacagagctctgcttgaaacaggtacacgggccagggaaatgccagcaagccagagcgggcgtggagatttttatgcctcactttctggagtcactgggccatgatgaatcataagtcttcagtggcctagcaatatccagataagaaaggaccaacttgggttccttaaaacaaagggaaattattattgccacttagaaaaattcagaaaagcacacactcacatacacacacacaaaatcactctcttatcccatccatttgtgataacatctgtgaacatgctgtggctctatttgcaacattttccttcgtgtgtgtgattgtgtgcatgtgtgcatgaccttttttttttctttttttttttttttttgagatggaatctcgctctgtcacccaggttggagttcagtggcacaatctcggctcactgcaagctctgcctcccaggttcatgccgttctcctgcctcagcctccctagtagctgggactacaggtgcccgccaccatgcccggctaatcttttgcatttttagtagagacggggtttcaccgtgttagccaggatggtctcgatctcctgacctcgtgatccacctgcctaggcctcccaaagtgttgggattacaggcgtgagccaccccgcccggcccttttttttcatttatactttttcatttagattgtaatgattaacagaaacaggggtacctttcccaggggtgtccaccagaagagttgaagaagaggtgagaagatcccaaggtgaagcctgtcaccacgcagacagaactgccccctattgtagacagtggtgggaagggcctggctcacatgcccctccttagaggcagcctcaagatgaaccagggaatcaaactcaaccaggaggcatgattccttctctcctgcaattgcacaaaaacaagtggtggtgaaacattgttctgttttcacaagagatgagggagcaggctttccaatatgctggaagtaattgtgcttagacacctcatcctcccaagctgtctagaaaggccatttcgctgtgttgtctaaataatgagggttttttcacaccatttctcaaaaggagattcgctgtcaacatcattttggtggttcaggtgtaactttcacttacagaaacttatgcatccttaagagatctcaattcttaagggtctaacttgccagagaaatctcattccagggactgattgtttttatcaccttctgtctggtcctgagtgactcactgtgtcacccagaaaagagacctgtcaggcagaatcgagcttaattcacctgctctaaacaattgttactgacacactgcttttaggttttcttctagcaccagataaactctgaaatcaaagcatggatatgagctcagtaggaaactaaggtttgagggagaaagagtttgtcacttagacctcttggctgttaactgaaactgaacttgctcacatcatctgcttccctgtaatgaactatgagggttctttatcctagtttctatttatgaagatggttgaaaattttcaagacacaagattttgaaaactcactgaattatgggcaaaaccatgactttcattgggcagacagagtcttctaagcccacagggatccccagatggatttttcaggacaaatggctcatgtgcctgtacttattgtctctgtggtgtgtcaagaagtagctaatggtttcatctgaaagctgccatagaaattctgtgaaccagaatgagacaaggcagcaggcatacagaaggtttgtcctgctctgggaagcatggaggatgttgtacttcactcctctctgagggtgtctaggaatacagaagctccttgacttacatctcaataaacccatcgtaagtccaaaatattggaagttgaaaatgcattgaatacacccaacctactgaacatcgtagcttagccaagcctaccttaaatgctctgagaacacttatattagcctacagctgggaaaaatcatttaacacaaagcctatcttctaatgaagtatggaatatctcatgtaatttattgaatactgtactgaaggtgaaaaccagaatggttgtatggatatgcgaagtatggtttctactgaatgtgtattgctttcccatcatcataaaatttttaaaaatcctaagttgaatcattgttagtccgggaccttcagtactgccaagtcccagagaaaacccttttactctggggagaacccactgatggctcattagatctgtcccttccccgaggtccgtgtgtgactttgagcaaaaagtgacttctttttgtgaatgtaaaatttgtgaaacttgagtttttccaatgtgctgtaaagtgttttattgtaaattgctcatctcaataaaatttacttcaggtttgtggactgtgaaaaaaaaaaaaaaaaaa

SEQ ID NO: 294 - protein, 423 aa, Homo sapiens
MVPHLLLLCLLPLVRATEPHEGRADEQSAEAALAVPNASHFFSWNNYTFSDWQNFVGRRRYGAESQNPTVKALLIVAYSFIIVFSLFGNVLVCHVIFKNQRMHSATSLFIVNLAVADIMITLLNTPFTLVRFVNSTWIFGKGMCHVSRFAQYCSLHVSALTLTAIAVDRHQVIMHPLKPRISITKGVIYIAVIWTMATFFSLPHAICQKLFTFKYSEDIVRSLCLPDFPEPADLFWKYLDLATFILLYILPLLIISVAYARVAKKLWLCNMIGDVTTEQYFALRRKKKKTIKMLMLVVVLFALCWFPLNCYVLLLSSKVIRTNNALYFAFHWFAMSSTCYNPFIYCWLNENFRIELKALLSMCQRPPKPQEDRPPSPVPSFRVAWTEKNDGQRAPLANNLLPTSQLQSGKTDLSSVEPIVTMS

SEQ ID NO: 295 - DNA, 900 bp, Homo sapiens
atgatgtgttttctgctcatcatttcatcaattctggtagtgtttgcatttgttcttggaaatgttgccaatggcttcatagccctagtaaatgtcattgactgggttaacacacgaaagatctcctcagctgagcaaattctcactgctctggtggtctccagaattggtttactctgggtcatgttattcctttggtatgcaactgtgtttaattctgctttatatggtttagaagtaagaattgttgcttctaatgcctgggctgtaacgaaccatttcagcatgtggcttgctgctagcctcagcatattttgtttgctcaagattgccaatttctccaaccttatttctctccacctaaagaagagaattaagagtgttgttctggtgatactgttggggcccttggtatttttgatttgtaatcttgctgtgataaccatggatgagagagtgtggacaaaagaatatgaaggaaatgtgacttggaagatcaaattgaggaatgcaatacacctttcaagcttgactgtaactactctagcaaacctcataccctttactctgagcctaatatgttttctgctgttaatctgttctctttgtaaacatctcaagaagatgcggctccatagcaaaggatctcaagatcccagcaccaaggtccatataaaagctttgcaaactgtgacctccttcctcatgttatttgccatttactttctgtgtataatcacatcaacttggaatcttaggacacagcagagcaaacttgtactcctgctttgccaaactgttgcaatcatgtatccttcattccactcattcatcctgattatgggaagtaggaagctaaaacagacctttctttcagttttgtggcagatgacacgctga

SEQ ID NO: 296 - protein, 299 aa, Homo sapiens
MMCFLLIISSILVVFAFVLGNVANGFIALVNVIDWVNTRKISSAEQILTALVVSRIGLLWVMLFLWYATVFNSALYGLEVRIVASNAWAVTNHFSMWLAASLSIFCLLKIANFSNLISLHLKKRIKSVVLVILLGPLVFLICNLAVITMDERVWTKEYEGNVTWKIKLRNAIHLSSLTVTTLANLIPFTLSLICFLLLICSLCKHLKKMRLHSKGSQDPSTKVHIKALQTVTSFLMLFAIYFLCIITSTWNLRTQQSKLVLLLCQTVAIMYPSFHSFILIMGSRKLKQTFLSVLWQMTR

SEQ ID NO: 297 - DNA, 6314 bp, Homo sapiens
gtcggcgaggagggtccggccggagttgaaggattgaactttccggctcagtcgcggcgtctgcctggtcctcagcagtgcagccccggcgcggagcagggagcctcggcccgcgcccggcgccctcgccctcgccctcgacccgcagccatggtgcccggggtgcccggcgcggtcctgaccctctgcctctggctggcggcctccagcggctgcctggcggccggccccggcgcggctgctgcgcggcggctggacgagtcgctgtctgccgggagcgtccagcgcgctcgctgcgcctccaggtgcctgagcctgcagatcactcgcatctccgccttcttccagcacttccagaacaatggttccctggtttggtgccagaatcacaagcaatgttctaagtgcctggagccctgcaaggaatcaggggacctgaggaaacaccagtgccaaagcttttgtgagcctctcttccccaagaagagctacgaatgcttgaccagctgtgagttcctcaaatacatcctgttggtgaagcagggggactgtccggctcctgagaaagccagtggatttgcggccgcctgtgttgaaagctgcgaagttgacaatgagtgctctggggtgaagaaatgttgttcgaatgggtgtggacacacctgtcaagtacccaagactctgtacaaaggtgtccccctgaagcccagaaaagagttacgatttacagaactgcagtctggacagctggaggttaagtggtcctcgaaattcaatatttctattgagcctgtgatctatgtggtacaaagaagatggaattatggaatccatcctagcgaagatgacgccactcactggcagacagtggcccagaccacagacgagcgagttcaactgactgacataagacccagccgatggtaccagtttcgagtggctgctgtgaatgtgcatggaactcgaggcttcactgcccccagcaaacacttccgttcttccaaagatccatctgccccaccagcaccggctaacctccggctggccaactccaccgtcaacagtgatgggagtgtgaccgtcactatagtttgggatctccccgaggagccggacatccctgtgcatcattacaaggtcttttggagctggatggtcagcagtaagtctcttgtcccaacaaagaagaagcggagaaagactacggatgggtttcaaaattctgtgatcctggagaaactccagccagactgtgactatgttgtggaattgcaagccataacgtactggggacagacacggctgaagagtgcaaaggtgtcccttcacttcacatcgacacatgcaaccaacaacaaagaacagcttgtgaaaactagaaaaggtggaattcaaacacaactcccttttcaaagacgacgacccactcgcccgctggaagtcggagctcccttctatcaggatggccaactgcaagttaaagtctactggaagaagacagaagatcccactgtcaaccgatatcatgtgcggtggtttcctgaagcgtgtgcccacaacagaacaaccggatcagaggcatcatctggcatgacccacgaaaattacataattcttcaagatctgtcattttcctgcaagtataaggtgactgtccaaccaatacggccaaaaagtcactccaaggcagaagctgttttcttcactactccaccatgctctgctcttaaggggaagagccacaagcctgttggctgcctgggcgaagcaggtcatgttctttctaaggtgctagctaagcctgagaacctttctgcttcattcatcgtccaggatgtgaacatcaccggtcacttttcttggaagatggccaaggccaatctctatcagcccatgactgggtttcaagtgacttgggctgaggtcactacggaaagcagacagaacagcctacccaacagcattatttcacagtcccagatcctgccttccgatcattatgtcctaacagtgcccaatctgagaccatctactctttaccgactggaagtgcaagtgctgaccccaggaggggaggggccggccaccatcaagacgttccggacgccggagctcccaccctcttcagcacacagatctcatcttaagcatcgtcatccacatcattacaagccttctccagaaagatactaaactgttcaaaaagattttgtgaaattgcacagatgtgtaagcttgttgaacttcggccacgagacatgcacacttccagaggcagtgggaactgctcagaggcccggactctcctatgtgactttagtgcaggaagaacttctgtcaatcatggacgcatctggagacaagtgagaaacagtagattggtgaagacagacaccagttccctacaagcatggagaaaatgaagaataggcctgtttaatgctaaattttgttttcatgtatggtgtcgctcatttctattgaattacaacagaactcagttttccctgaatttggagcaccaaactccgccccaaaaaggagagtaacaaatacacaattcacacataacactaagcgtaaatctaatcaataaaatatatttttgactaaattattgattcgatatgaaaaatcaactaagattacacagctttgtttttttgaatctttcctaagatcatttttatcctaggtgatttttaaatgaaaatgtgtaatctaaaatataccagcgaatttaaatctaaaaatgctcctactttaagtaccttgtgctgctctttatgcaaaggtaaatcaaagttccctctataaattatgatttacaaaagacacccaagccagaggaactcaatgaaataagctgctaatcagattttaccttggagaaatgaaaattatttcttggggatgccttttaatatttgatcctattatgtgagagattttcctgatatgttatcttatttatattttcccttattttcctcaatgcagataatagcttttggtgcacttttgtttcaccatctgaaaattcacaaaacttcttgcttcaaatgaaaaaatcccaactattgagcatgtttaaatctttgcagagatttgccttttcttaatcaaagaaaggtctttgtgtgctagaatattattggtaatgttttaaaaattcctttgattgatagagaaggacagttatttgcatttaattcacccatatgctttcaaatctagtatatcttactttttggaaatgttttatgctacaaattagtgccttgtagcatgaacttaagtcaaaacgtgttatcaatatagagtgttgcagtgtatattgtaacaacctaaaacgcagagaagtttaatttaatactgttttttttcttgaaggaatactcacatacatggtttgaaatgtgcatagatatgcatgtctatataattataaatgcatgtgtatatatatgcaaatatatgtacatatacatgtatatacacacagacacatgcatatacatgaatataccttgagcatgaatccctggagaaatcgttttcgtagctcaccaatggtgagtaaagatacagctcttttaaaggtcataaggataatatattttccccatcaatgctgattctgagaaaagagcaatttatcaaaattaaacactgtaaaagaaaggtgtccatatgtctttacctacctaagtaaaacaggaagaaaatcagtaacattatccttaggttttgacaatggtacttgcttcttgttgttttattgtttcctgaattcatgcagatgcctggccattcctgggaagagtggataactcagaagtcactgtactccacagagcctcactgcagtgtctaaaggtagatgcaaattaaaatgcagggaaaataacttttctgatgttgatgcatgtctttgggaaacacatttataaacatggatacctgataatagatattgaaacccatttcctgtgtgttaaaatatttaaaaagtggatattccaggaatgttttgcagctttgtacaagtaacataaattggacacctcagaatgaaagttcatgttggttctgaatggttcactgcagctcctgtcacaagctgggatggatttatcacattgagttatgaaattacctggttctaagaatttttgagtggcaaaaatagaaaacaatcttcatttgaaaacatccctaagcttgaataaatggataccatagatagcttctcttttttattctggtgtcattaccagcatctgaatttcaagttcttaaaatttcaaaaattaaaatttttcattattagctatccatttatcttttacatgaacttgtcatgaacaaattcaaatgtttatgccagcaaatttttgtactgttgcatagttaaaaatgctgggagtctctgcatagatacaaaatattattaaattattacataaatttaattttataaaatttaatcatgcttcttttgtctgggtaatagacattggacagatatttttagttcagatggtgattctgaagcttacatctcccttaaaaaaatctaaagcagctcttatgggcttctaattttaatataaataaataatttaaattttattggtgttattggaagaaaaatgctattaatgggctaataaaaaacatgtgtttctcttatggattttaataagctccagtattattcaaatgatcaaaaatatagttataattttttgaattttaaaaatgtgattgctctaataaagaataaaatctatgctttttaacaaacatagttttggtgcctaattctgtaatatgttttattgaaattagattcatttctctaatgtgagaaaaatatatccagtaatagtattgactgtttaaaaaattgagctcatcaaaaatattgtcatcaaatacaggtggttaatctgacatacattgcagttacatgcattatttttatttacaacatttgctccttaatgatgaatttatctgtgttaccctgtttttctacctggaactccatagaatgatgtttgcaaaccaacatgtgctcttttcagtcattcactgttttaatatgacatggtagagaagataaggtttatggcaggtaattttttgtaatgtgtattaaacgaagttcaaagattagaaatacatctgtgtcctgaaaaccttagatacatagccgactgtatacagaggttcatctcaacctcaacactattgacttttggggctggatagttctctgttgtgggggtttgtcttgtgcactgtaggtttttagtagcatccacactttctcctcaccagatgccagttgcaccctcccccaagttgagacaaccaaaaatgtctccagatattgccagctaccccttgagggatggtacctctggttgagaaccattgctagagaatgatctttactgaatttgccctttataagaaacccagtgaatttctagagcaagtcccaaaaactaagggacagctaagaagttattatggttgacttcaaaggcctaaactgtgttttttatgtccactaaacaacttgattaaaagacggaattttgactcgtgtctgtatcatacaagtacaaatactaattttgccctatgtatccgtaaatgtcatttgtgattttgacttatttatttaatgccctttcttatgccgtgggttttcaagtttactcatttctatggttgcaaataactctaaaacttattatataaactttcatattataggcagaacacaatggctaaatatctgttgcatgtactttaaagtttattataaaatataaacagatatataaagatgttgactcttacctgtgattttgcatggtcagactcggtgtcaggtacggagaggattctcatgactgtcttacctctactgaatattctagtgagttatatgatttacggagtgattaacagaggtctatataaagttacttttcccctttacttaattatattgtagtgtgcagataacaaaactgctaccttctcatccaagtggtctgtagaattcatgtcccttacagtggtcatttaaagtcaatatttatttatgtatgtaataaaaaaagttggatttttgtgtatgtctgtcacattatttagagagaagtaatcttgtaaaaatgttttgtaaaaaacaaaaaagtattgtaaatagtcttgatattctgtgactcattattttcatgttagagtttgtacatactggttcaataataaagtatccttaaaccaga

SEQ ID NO: 298 - protein, 680 aa, Homo sapiens
MVPGVPGAVLTLCLWLAASSGCLAAGPGAAAARRLDESLSAGSVQRARCASRCLSLQITRISAFFQHFQNNGSLVWCQNHKQCSKCLEPCKESGDLRKHQCQSFCEPLFPKKSYECLTSCEFLKYILLVKQGDCPAPEKASGFAAACVESCEVDNECSGVKKCCSNGCGHTCQVPKTLYKGVPLKPRKELRFTELQSGQLEVKWSSKFNISIEPVIYVVQRRWNYGIHPSEDDATHWQTVAQTTDERVQLTDIRPSRWYQFRVAAVNVHGTRGFTAPSKHFRSSKDPSAPPAPANLRLANSTVNSDGSVTVTIVWDLPEEPDIPVHHYKVFWSWMVSSKSLVPTKKKRRKTTDGFQNSVILEKLQPDCDYVVELQAITYWGQTRLKSAKVSLHFTSTHATNNKEQLVKTRKGGIQTQLPFQRRRPTRPLEVGAPFYQDGQLQVKVYWKKTEDPTVNRYHVRWFPEACAHNRTTGSEASSGMTHENYIILQDLSFSCKYKVTVQPIRPKSHSKAEAVFFTTPPCSALKGKSHKPVGCLGEAGHVLSKVLAKPENLSASFIVQDVNITGHFSWKMAKANLYQPMTGFQVTWAEVTTESRQNSLPNSIISQSQILPSDHYVLTVPNLRPSTLYRLEVQVLTPGGEGPATIKTFRTPELPPSSAHRSHLKHRHPHHYKPSPERY

SEQ ID NO: 299 - DNA, 2712 bp, Homo sapiens
gagactttaacatcagaaaaaggatggacttgttgcagttgctgtagcattcaaagtcaaggtgatcatttcaaaccaagcatcagcaacaattaaaaatattcacttggtatctgtagtttaataatggaccaacatcaacatttgaataaaacagcagagtcagcatcttcagagaaaaagaaaacaagacgctgcaatggattcaagatgttcttggcagccctgtcattcagctatattgctaaagcactaggtggaatcattatgaaaatttccatcactcaaatagaaaggagatttgacatatcctcttctcttgctggtttaattgatggaagctttgaaattggaaatttgcttgtgattgtatttgtaagttactttggatctaaactacacagaccgaagttaattggaattggttgtctccttatgggaactggaagtattttgacatctttaccacatttcttcatgggatattataggtattctaaagaaacccatattaatccatcagaaaattcaacatcaagtttatcaacctgtttaattaatcaaaccttatcattcaatggaacatcacctgagatagtagaaaaagattgtgtaaaggaatctgggtcacacatgtggatctatgtcttcatggggaatatgcttcgtggcataggggaaacccccatagtaccattggggatttcatacattgatgattttgcaaaagaaggacattcttccttgtatttaggtagtttgaatgcaataggaatgattggtccagtcattggctttgcactgggatctctgtttgctaaaatgtacgtggatattggatatgtagatctgagcactatcagaataactcctaaggactctcgttgggttggagcttggtggcttggtttccttgtgtctggactattttccattatttcttccataccattttttttcttgccgaaaaatccaaataaaccacaaaaagaaagaaaaatttcactatcattgcatgtgctgaaaacaaatgatgatagaaatcaaacagctaatttgaccaaccaaggaaaaaatgttaccaaaaatgtgactggttttttccagtctttgaaaagcatccttaccaatcccctgtatgttatatttctgcttttgacattgttacaagtaagcagctttattggttcttttacttacgtctttaaatatatggagcaacagtacggtcagtctgcatctcatgctaactttttgttgggaatcataaccattcctacggttgcaactggaatgtttttaggaggatttatcattaaaaaattcaaattgtctttagttggaattgccaaattttcatttcttacttcgatgatatccttcttgtttcaacttctatatttccctctaatctgcgaaagcaaatcagttgccggcctaaccttgacctatgatggaaataattcagtggcatctcatgtagatgtaccactttcttattgcaactcagagtgcaattgtgatgaaagtcagtgggaaccagtctgtgggaacaatggaataacttacctgtcaccttgtctagcaggatgcaaatcctcaagtggtattaaaaagcatacagtgttttataactgtagttgtgtggaagtaactggtctccagaacagaaattactcagcacacttgggtgaatgcccaagagataatacttgtacaaggaaatttttcatctatgttgcaattcaagtcataaactctttgttctctgcaacaggaggtaccacatttatcttgttgactgtgaagattgttcaacctgaattgaaagcacttgcaatgggtttccagtcaatggttataagaacactaggaggaattctagctccaatatattttggggctctgattgataaaacatgtatgaagtggtccaccaacagctgtggagcacaaggagcttgtaggatatataattccgtattttttggaagggtctacttgggcttatctatagctttaagattcccagcacttgttttatatattgttttcatttttgctatgaagaaaaaatttcaaggaaaagataccaaggcatcggacaatgaaagaaaagtaatggatgaagcaaacttagaattcttaaataatggtgaacattttgtaccttctgctggaacagatagtaaaacatgtaatttggacatgcaagacaatgctgctgccaactaacattgcattgattcattaagatgttatttttgaggtgttcctggtctttcactgacaattccaacattctttacttacagtggaccaatggataagtctatgcatctataataaactataaaaaatgggagtacccatggttaggatatagctatgcctttatggttaagattagaatatatgatccataaaaatttaaagtgagaggcatggttagtgtgtgatacaataaaaagtaattgtttggtagttgtaactgctaataaaaccagtgactagaatataagggaggtaaaaaggacaagatagattaatagcctaaataaagagaaaagcctgatgcctttaaaaaaaatgaaacactttggatgtattacttaggccaaaatctggcctggatttatgctataatatatattttcatgttaagttgtatatttttcagaaattataaatattattaatttaaaatttgaa

SEQ ID NO: 300 - protein, 702 aa, Homo sapiens
MDQHQHLNKTAESASSEKKKTRRCNGFKMFLAALSFSYIAKALGGIIMKISITQIERRFDISSSLAGLIDGSFEIGNLLVIVFVSYFGSKLHRPKLIGIGCLLMGTGSILTSLPHFFMGYYRYSKETHINPSENSTSSLSTCLINQTLSFNGTSPEIVEKDCVKESGSHMWIYVFMGNMLRGIGETPIVPLGISYIDDFAKEGHSSLYLGSLNAIGMIGPVIGFALGSLFAKMYVDIGYVDLSTIRITPKDSRWVGAWWLGFLVSGLFSIISSIPFFFLPKNPNKPQKERKISLSLHVLKTNDDRNQTANLTNQGKNVTKNVTGFFQSLKSILTNPLYVIFLLLTLLQVSSFIGSFTYVFKYMEQQYGQSASHANFLLGIITIPTVATGMFLGGFIIKKFKLSLVGIAKFSFLTSMISFLFQLLYFPLICESKSVAGLTLTYDGNNSVASHVDVPLSYCNSECNCDESQWEPVCGNNGITYLSPCLAGCKSSSGIKKHTVFYNCSCVEVTGLQNRNYSAHLGECPRDNTCTRKFFIYVAIQVINSLFSATGGTTFILLTVKIVQPELKALAMGFQSMVIRTLGGILAPIYFGALIDKTCMKWSTNSCGAQGACRIYNSVFFGRVYLGLSIALRFPALVLYIVFIFAMKKKFQGKDTKASDNERKVMDEANLEFLNNGEHFVPSAGTDSKTCNLDMQDNAAAN

SEQ ID NO: 301 - DNA, 44788 bp, Homo sapiens
atctatgtcagagtcatgcccagtaaataaaatgaataggatcagagatgtagatataaataataatgaagtaatcttcttcctaaaattttgcttgatcacttgcaccttgttgaatttagatatgactctaggttttccagtatttatgagacagtatttagaatgagatttcacctaatagcaagtctggttctctgatccaaagatacaaaccactatttctttctttctttctttgagatggtgtctggctctgtcacccaggctggagtgcagtggtgcaatctcagctccctgcaacctccacctcccaggttcaagcaattctcctgcctcagcctcccaagtagctgggattacaagcgcctgccaccagacctggctaatttttttttttttttttgtatttttagtacagatggggttttaccatgttggccaggctgcttttgaactcctgacctcaagtaatccacctgccttgccctcccaaagtgctaggattacaggcgtaaactgccaccatgcctggaccaatccactttgtctatccaagggtcatgtatggctagaaaaatttactacttctccatttttaaaaaagttggaaaattttgagtgttaattccctcagcttctgaaagtaattttttacatcctgcccaattgaaaaaaagtgatgcaaaatgttggtaaatcatcacagccaggagccaaaaaaaaaaaaaggaactctcccaaatactgggtgctcctcagaccaaataatgatttaatccatacctattaaaattttgggtcaagcatcccacatatccaaggaagtttccattctactattttacaaatcattcaattttgaaggactatatctctgctattcacaggcattcatctttctctcaacaggtaatatgtagctgcaggtgtggaaaacgataatacaagttctttcgaaggcttcatcctggtgggcttctctgatcgtccccacctagagctgatcgtctttgtggttgtcctcatcttttatctgctgactcttcttggcaacatgaccattgtcttgctttcagctctggattcccggctgcacacaccaatgtatttctttttggcaaacctctcattcctggacatgtgtttcaccacaggttccatccctcagatgctctacaacctttggggtccagataagaccatcagctatgtgggttgtgccatccagctgtactttgtcctggccctgggaggggtggagtgtgtcctcctggctgtcatggcatatgaccgctatgctgcagtctgcaaacccctgcactacaccatcatcatgcacccacgtctctgtggacagctggcttcagtggcatggctgagtggctttggcaattctctcataatggcaccccagacattgatgctaccccgctgtgggcacagacgagttgaccactttctctgtgagatgccagcactaattggtatggcctgtgtagacaccatgatgcttgaggcactggcttttgccctggcaatctttatcatcctggcaccactcatcctcattctcatttcttatggttacgttggaggaacagtgcttaggatcaagtcagctgctgggcgaaagaaagccttcaacacttgcagctcgcatctaattgttgtctctctcttctatggtacaatcatatacatgtacctccagccagcaaatacttattcccaggaccagggcaagtttcttacccttttctacacaattgtcactcccagtgttaaccccctgatctatacactaagaaacaaagatgttaaagaggccatgaagaaggtgctagggaaggggagtgcagaaatatagtaaggggtgattaaactttgggattgtattttgacccatcttctatatatgttgttagacctagcaaatataggaatgttttggcattgcaggctgaagaggcatttaatgagatgggggaattcaatggtttagctaggtcaagaaaataggggctaggagcagtggctcctgcctgtaatcccagcactttgggaggtgggagtattgcttgagtccaggagtttgagactagcctgagcaacatagtgagacccccatctgtacgaaaaatttaaaaagttagccaggcatggtggtgcatgcctacagtcccagctactcagaaggctgaggtgggaggattgcttgagcctgggaatttgaagctacagtgagccgtgtttgtgccactgcactcagtctgggtgacagagcaagaccctgtcagagagagagagagagagagagagagagagagaagaaagaggaaagaaagaaagaaagaaagaaagaaagaaagaaagaaagaggaaagaaagaaagaaagcaagagtgtaaaaaatgtaatattcctcctgagttgacaatcacttgtattcctttcaagtccttctaaatcaagcattcatcaccagaagcctccaaaatattgttcgtgaatgtagacactaggcatttttgttctcataccagtttctatcacagttatttaataggtcctcaacgatgtatgaaaagaaagatcttagaaggacttagtaggtcctcagcaatatatgaaacgaaagatcttcgaagtcttgctgaagaagcacttatttttttctagaaagttcaaatatgcttttatagtgccaaatgcttgaatgagagccaaaataaattgtttaattatccagctttagtatatccaacaccataatcaaccgtggattctgcacattttgaatcatttatataattgagcttaatgacattcatgtttgattttctgagatgatagagaatcaagaagaaaggagataaagcaagaccatgaggtgtttgctttatgtggaaggaagaatttcttgttactactcaatccttgttattacttgttaatggcaaaagaaagctaaggagtctttttgattaaaatgtttgaagataattccgtctccacttttcccatatgttatcaggataaccttgaatagaggcagagagaaatgagattaattctgggggactgttagaatctttatgattgggttattccccaagtgttgatttcttcacatttacattaatgatagcagtacctcaatagtcatcagggaaattgatttgaatggttcgtgtcaaataatggatgtccaccttaaaggtaagtatgtttcttcagatctgacatatcatttgaatcaatcttatctcaaaacttgggaaaacatctattatgttaaaatttctgcaaatgaataagggattccaaaatttgggagtattgccagcagcatcattaggaactggatacaaaatgggtctagcaatttctcatttaaactccctcaaaaattttaagaaaggtcaggttaatctagaagccttagaaaatgtaccacatagctaatgtattttcctcaaaatatgtaactgtcagatataatgtgcatatttaccactttttgagccctaactcttatattttatctggtggattacattatattttatttagattagttagggtttatgagaacggggttttggtttgatttggattgtggaagatattctgttatttccataaaaaggcagaaaaattagaatatgtttgatttttcctactttattacacggagtgaaatatgatatttgtccatgataatgtttatcaaagggatcaattcagccaacagaatttggagacccacagcttagcattttccatctcttctactagaaaacaatttatgtgtcttactagcatgtatatactatacatttctaaataaataaaaatccttttagaatcattctctaaaaacaatgattacattaattttttataatctccatactgtttagacatgcattactttagaattaataggtaggacagaagattaaaaaaacagtataaatctcaaaaatacattgattttggaagcaccctgtggaatttctgactcattttcttcaaaattttattttttctccacaagctttatgttaattacactctcctctaaaaaacttagaaccattattataggttttagggaataatgagtgtcaggtctcaggggaaaatgtcactatgtccttaataacatcctcatggcccagcatcaccttttacttaatttgtaggatagtttataaagttgatatagtttacttaggcataaagtgggatgaatcaaatatattctaatagttctgccttctcatgggaatcacataatactgcccataatttaaaaaagtatcagaaacatttcatttttattctctacaggttcttccttttgctaatctatgactcattcttacagtctggtcttttacagagacagagcagatggaggttcagatagaagagcatcaggatcctactcactgtgcacaattgcatatctcttagccatggtgctgaaagtaactccaggagaaataaatattacatacatgcctctgtgcgtgtttttctactcactgtgattttaaattatgatctataagaggacagctcaataagtgcctattaatcagattagcacatcactttccatcttgttgtcttgatgggtagtacaacagccatgaagacaactttcacctatttcatattttgtccattttcaaggttttcttcctcatttatccattcagcaaatatatattaagcacctactacgccccaggcattgttctaggtactggaacaaaatacacaaaaatacacacccacaaaaaaatcatcatagcattgagtttgcattctagtggagaagaaagaaaactgacaaataagagaaacatgatagtaatacctttgtaagtgttatgacgataagtataacagggaagggtggaaggaattacagaagggctgcaatttcaaatggaggaagtcagggaagaccttagaaagtatgttcaagcaaagacctgatggagataagaaagcacatctgtgggagagtgatcccagcaaaggaagtagcgagcacagtattttttatctcaggaaaatgaagaagaaccagagaaaggggttgagtgagcaggaggaagatcaagaccaggtgtatcctgaaagagcagaaagtgtttccagaaggaaggagtgatcaactgtctaatatgtgactggtaggtcaattgagattagaagtttcatgctgtaaatgggaatcatgtatatgcaattcctaggagaaagatttgtaaagcccccttcacatgatgtgtgatttcataagctcctcctagttaattccactcctatcatcataatacactccatccaataataagcagtcaggcctggtatcggaagtcaatatcttaagtttgtcctcagggtttttcactagttaccttatggtctccacctgaccctttggtgtggtattgcatgcagctccagcctatcaacactcagagagttctcacctggagccaggcatacagagtctaaggaaaaatcacgctgctccaagccactctgccttcccccaaatctgatatatatatgtcaaaaataaagttagctttgaggttatatagatccgcagagagaagggccaagtgtttaagaacatgggcttccttgaataattggaattccatctctactttagatttaacttctccatacttcagtttcttcatttaaaaatgtgaataataatattgccattctccaagggctattttgatgtttaaatgagttaatacatgaaagcatttagaatggttcctggcatgttgtaagcacaatgtacatgtttatagtgttgtcacaatatataaaacatggtagagataaagaccgttagaacagtattagcctgaaataagttgataataagttcagatggaaaaacaaaaaatgaaagaatagctaagaagacactgaaaagtaaaaaccatgaaggagcaccggcccttccaaacattatcatgaagctctatagttaaaataacgtggtactagtgcgtgactacaccagtggaatagaataaaaagcccagaattagatccaaatatatatggcaattcagtatatgacaaagatggtatctgaaataactaggtaaaaatagaattatttttattggtgcaggatcatctagatcatcattaaaaaacataagatcctttccttacacccaatacaagaataaaccccagatgaattggggatctagataaaattgaaaacataaaagtatcaaaaggaaatggatgaattccccttgatgattggctaatttgtctacacatttaaaaagtggcaaaaatattgtaaatgaagtcaaaatgcaacagacaaaaataggagaaaatattcacaatgtctagcacaaagggctaatatctctaatatgtaaagaaccattgaaggaagaagagccaaatatcaaatagaaaaatggagaagtgaagcaatcaacaaaccagacaaaaaattattctcaccatatgaaaaaatttaaatgcatgtataattagacaggcacaaattaaaacaatattgagatacaatttctcacttattagactggcattaaaaatattagcatgttcttttagtgaagctctgtggaaacaggagttctcatggccagcaagagctgaactgagctgccagttgtgggagaagtcaattaaaacaacagccaaggaggaggagccaagatggccgaataggaacagctcgggtctacagctcccagcgtgagcgacacagaagacaggtgatttctgcatttccatctgagctttgaagagagcagtggttctcccaccacgcagctggagatctgagaacgggcagactgcctcctcaagtggttccctgacacctgaccccagagcagcctaactgggaggcacccccccagcaggggcacactgacacctcacaaggcagggtattccaacagacctgcagctgagggccctgtctcttagaaggaaaactaacaaacagaaaggacatccacaccaaaaacccatctgtacatcaccatcatcaaagaccaaaagtagataaaaccacaaagatggggaaaaaacagaacagaaaaactggaaactctaaaaagcagagcgcctctcctcctccaaaggaacgcagttcctcaccaggaacggaacaaagctggagggagaatgactttgactagctgagagaagaaggcttcaaacgatcaaattactctgaactacgggaggacattcaaaccaaaggcaaagaagttgaaaactttgaaaaaaatttagaagaatgtataactagaataaccaatacagagaagtgcttaaaggagctgatggagctgaaaaccaaggcttgagaactacgtgaagaatgcagaagcctcaggagccgatgcgatcaactggaagaaagggtatcagcaatggaagatgaaatgaatgaaatgaagtgagaagggaagtttagagaaaaaagaatgaaaagaaatgagcaaagcctccaagaaatatgggactatgtgaaaagaccaaatctacgtctgttcatatcctttgcccactttttgatggggttgtttgtttttttcttgtaaatttgtttgagttcattgtagattctggatattagccctttgtcagatgagtaggttgcaaaaattttctcccgttttgtaggttgcctgttcactctgatggtagtttcttttgctgtgcagaagctcttgagtttaattagatcccatttgtcaattttggcttttgttgccattgcttttggtgttttagacatgaagtccttgcccatgcctatgtcctgaatggtaatgcctaggttttcttctagggtttttatggttttaggtctaacgtttaagtctttaatccatcttgaattagtttttgtataaggtgtaaggaagggatccagtttcagctttctacatatggctagccagttttcccagcaccatttattaaatagggaatcatcctttccccattgcttgtttttctcaggtttgtcaaagatcagatagttgtagctatgcagcgttatttctgagggctctgttctgttccattgatctatatctccgttttggtgccggtaccatgctgttttggttactgtagccttgtagtatagtttgaagtcaggtagcatgatgcctccagctttgttattttggcttaggattgacttggcgatgcaggctcttttttggttccataagaactttaaagtagttttttccaattctgtgaagaaagtcattggtagcttgatggggatggcattgaatctataaattaccttgggcagtatggccattttcacaatattgattcttcttacccatgagcatggaatgttcttccatttgtttgtatcctcttttatttccttgagcagtggtttgtagttctccttgaagaggtccttcacgtcccttgtaagttggattcctaggtattttattctctttgaagcaattgtgaatgggagttcactcatgatttggctctctgtttgtctgttattggtgtataagaatgcttgtgatttttgtacattgattttgtatcctgagactttgctgaagttgcttatcagcttaaggagattttgggctgagacaatggggttttctagatatacaatcatgtcgtctgcaaacagggacaatttgacttcctcttttcctaattgaatactctttatttccttctcctgcctaattgccctggccagaacttccaacactatgttgaataggagtggtgagagagggcatccctgtcttgtgccagttttcaaagggaatgcttccagtttttgcccattcagtatgatattggctgtgggtttgtcatagatagctcttattattttgagatacgtctcatcaatacctaatttattgagagtttttagcatgaagtgttgatgaattttgtcaaaggccttttctgcatctattgagataatcatgtggtttttgtctttggttctgtttatatgctggactacatttattgatttgcatatattgaaccagccttgcatcccatagcagcttctgtgtggtgtaatatatgacacaaccaatgcagtcataatcatttacccactgccatactttcttcactgaaaagttcttcactgcattattccttacaaaatgttacatgaaatctcatgccactctagtataaaccaccagatagtaaagaaggttgaaaccttataggcaagaaagataggctcatacctagcatattcttgtctatacttttcaaaataaattgctgcctcttctgatttggaaagggtctaaggtggtaaacttgtctccaatttggtcaccaacttgctagatcagtttcgataagagggagccagtgatgttcggtccacacattgcctccatctcttttaccagaactactgcatttacaactccgttgtgccaggactgggatggttaatgatagaggctggctgatgccagctagcttaggcaactacccagatgttgagtccatcttccataatggatattccctcatggacattaaggtgcaatgcaaagttcttcgcacttatactaacttccatgtaaacatctacatatccctgtttcagacaaattggtctcagatcttccattcttgctccttaattaatcagccaggccattttgtacctcccattatattctttcttgggtcacttcttttttcacacacagaaatagatggccaagttcacttcccagagttctgcccattgggaagatttctcaccagtgtctttaggaccactcatgagtggtgttgtagtgtaacagcaatccattttcagctcctgttaacacattgggctggctcatctatgagctatgtatgagctttcttctctactgcaggctagttattggccacccccaatctctgccacagacagacatagaaatgaactgaaggagaggtcccaatgcaaaaaagatgacatataagaccaggctacctgctcatgaagcttacttagactgccagccttgcttgtgccctgtccaggatataccatttccatctaatattgcattgccaacggcccacccaatcttatgatttgatgaatctggatgcaacccagctcatgatgggcagttcttgcctcatagttacttgacgtcatgtggtcagactctgtaactctacaggtgcctaatagcatgccataaactggttttacaaacatttatagttctctatttcagataactttaagaaccctaagggtctgcactacaattctactattggagtttaacctgtggcttcacatgatgcctagagttgtggaatactataattatgttgcagtctggaatttctaaagagccttttcctgttctggggcccactcagagatggaaaccttccctattggtaaataggttggaggagtatccaaaatgcatttatagctgaggctgcaactcggaaaatcttatggggagcttaggagctaggctggcctttcagagttttcccaatagaagcaaagaagatgagtctttgtaaactgtggaggaggtaaaaccttggccaaggcatttccctatggccaaagaaatttctagggatgattcatcagtcatcagtatcttaggaccttggggatgagtaccttggccctgaagatgttatctgggtggagcaccgtggtatctattagagtgggtctgcggataagaggagctgcatccaaatgcaatgctggtcataggatcctggactttgagcatgatgccatgattggacagacttttagggatcttggaaagaagtaagcatatttcttatatgaaaagattgttaactatgatagattgattataaaaatatttctaattctatagccctctctgtgtttatgccacttacaatgtaactttgtagcatctcccatcaagaagtaaagtctattccctgagcccttgaatctgaattgttttgtgacttctttggtccacagaatatgccagaggctttgcctgcttccaactctctttcatgcttctccaattttatcttgagaacatgctcaggatagcaaagtgaaaaatgacatacactgagtagagctattttagcccagttttctttctcaactgatgcttcagccaaggctagtaaaattattgtgccaaactgtattgtccacagacacatgaatgagacctgaggagctgaaccactcagctaaaccagggacttctaagcaaaaataagtatttttggatgtcccagggattttgtggttatttcttccatagtattatattgaaaatagatagcagatacaatttatgactccttttgtagggccaccataatttaaataccaaatctgataaggacattgcaagaaaggaaaactagggaccaatctcttgtgagcctagatataaaaatcctaaacaattttgttaaccaattttatctagtgttatacaagaagtatagcatattgcactcgtgttgtttatcgcaggatagagtggtgtaacatctgaaaatcatttcgtactatttatcaattttttaaaaaaatttggcaaatctctacagatttggacaaagcatttgataaaatcaaacccctatttaaatcttagcaaactaggaatacagtgaaaactcacttaagctgatgaagaatacttacaagaaacctgcagcagacatcatacacaactataaggtattgaatgagacacagaggcccacaatcatcacttctttttggcattatactgatggtcctagcttgtgtaataagacaagaaaaataaataaaatacactagaaatggaaagaagtataattatcatttttttcccaatgacatgattgtgtgtgttcaaatgcaaaagagtctacaaagaaactattagactaattaaatgcgttcatgaaggtcactggaaaacagatcaatgcacaaaaatcaattgtatctatacatatcagcaacagataaatagtaaaatgaaatggggagacaatttgatcaagattttgtgacaataaaaatgacagattttactacaggaggtatttttaaaaggaagcctcaaaagaacacttttatctttgtactcaaataacttctttttgataattgcagcatcaaattaagtgaatcactaatttgactgtcctgttttgaaggaaaccttattgttgtcttcggttactccagatatttctcttatcacgtgatcttactattcactgttttaaaatcattattcttatgaatttcagtatggaaggtttttataattgtagaatttcagcatctccccacaccaccctcatttcctcttaatgtgagccaacatcttcagccttttctgctgttatagaatttcttttacagaaaatacaactggctcacctgccttattgacatagaatttgattctaattttcagcaaatttgcaagacagaattttatataaaacattatgttctacctcattacttttcctttccacagtgcattcatcatatatatacatgaaagaacttatttccactcaataatttttgcaaaacattcagtgcaaagaataacataaagtatatttcaaccaaatatgggcatcagaatgagataaatattgctaaggatttattcagctcccccactaaaacattcacacattcctatgctttcacaaactagaatactatttctaagaccactaagttctgtaaggttctcaatgtcacacttttccaaattttcctatgcatttgtgtctagcttccattcttgaatccttgcttttgggggcctagctagaccctgcctgaactctacatatacccaatatacaggtataagataccaagattacatttatgaaaaggcctgaattcttccagaatcatgcccactctaattttgggggcagtaattaaaatttgttgagtcataatatcagttcatggaaacccatctaatccaagaatgctccaagttttatctgagcttctacatactaaacataatgatgttgctgaccttcccatcataaaagggaaaatgtaaactaagaatgaggtttgggtatcctactttaatttatactgcaaatcagccttgcttcagaacatgttaaatttttacttagtctctcaaatatttaatacttggtgtttcctaaagtactattaaaactgtctttctcaatgctcagttccctcttatatacaaagttcttcctgagagctaagcctgactgatccaacccccaaggctagtcactaaaatattactgtagccaagcctatttcattctgatataaggagaggtaattgattagatggtcagaaattaatacacaaaattatagttatattgtttcaagagatctttcactactaatcaagtaagtggtcctctgggaaattagagtaagtggggagtgttgagtttggcaagaatcatccttaagcattagtcaaagaggagaaattaaacttaaaccaaaatgtagattcatagtatatctaggctttctaacaaattatgttaattttggaaagtttgtttaacctctctaagcctccatttccacattaaaaaaataaagataaagtgtagcaattttataggacattgtaagcatagtaaacattgatactattattattaaactacagattcttccctgtttccagtccctttgataactgagcattatttcttaatttttcactttaaggactactgaatttttttagtttatttaccttggttcactctgcaaactaaagatttgtctttattttcttatttgtttagccctctgtttttttttctttaaatactattgcctttatttaaattatctattgtaagcatttatgagaaaaaagaaaatccaacattataaacattttcctctgactaatcccgccctcacgctcactcttactttcagagataagcactgttattagtttgggaaggttttaaatgctatacattattttttgtggattacatcttagtctttttccctggtttacttgatgccccttccttctcccttcacagctatcagcctctgtgctccagattgcccacatgaaggagctaacaagtgttctttattcttcttcactctcgtataattccatgcaggcgcacaatacatacagttatattgagagtgttttagtcattgtttatataattaagatcatgttatttattcttttttacatcttcattttctcactcagcaacatcacaggcaaatacttctggattaggttaattactagtcaatttcctattgagaaactaattttttctctactttggccaccacaaacattgctacaataaaaattattgtttctacgatttgtgtaccagtatattttattccataggatagatttccatgaatgccattgctatgttgatgaacagagtatttttttcaagattaactgccctatttatttctaaaatgtcagtgacactttgaatttctaaccataatttatgagaggttttttccttcagcaacattcaggagttactgctagttacattgttttttcaatctgataagtgactcatcattactactttaatatatttgtctgaatatttgggaatttaaaatcttatatagatttgctattctgagttcacagtatgtatatggtcatattatttagcattttttcaattgtgttatttgtgtttttcttgggctttataaaaactctatttatattgtagataccaaccttttacataaccacaaatatattttctcatatctactcatccttgaaagctgaggaaactatatattagaatgtataaaaacaaatcctgtatagaaaaactatagaaaaatataaatctctttttaatcttggaaaaaaatctaggaaattacattgacccgaagagcttttcaactaaggctagaaattcaaaatctatgaaagaaaagaagcctatttggatatataatgaagaaaactactttatgtaaatcaaggtaaaaatatttctacatcaaattaactggaagcctattttattgcatagatactgacctcaggatttcagagtaaatggacagttttctgtggcttgacagaacttgattagtaaaaaggaaacgaacactcagtttaatggcacaaaatccagactttatttgataaagtattttagtccctgctgtcgttcccttttgtctcagaaacaattgaggagacaatccccagagaaagggtatcagggagcaaatctaaactaaaatgaagtatcacatcacagagatctcctccttctctcttcccatcagataccatggtcaattaccataaaccacatgagggttgttatcttcccctgtaagccagagaacacccgacattcaaaaatagtttcctatccctctcatttattttgtaaacctggtgaggagaattctggaaagatcaataaataccttcatacttggtaatataatatcagaaaaacatgtctgatcatctgtaatgctttgtacctattctcatattttctaaattaatcctgaatggatatcttataatttgccacttacagcgtgaaacaagggaaaaatgaacaaacttcaccatatcagtttttacaattaatagcttacgaagaggttattgaatccacatgcctccagttcatcctatttgaatttaaagcttcttggacacacaaatcatcctatcactaatgcttaaaatagaggtatgtagaacacatttaagaaatttattatataaaacctgctaaaatttgggtgttttgagcacttatggacgtttatgattatctcactcagaaaaatttgactaaggctccagtttcttaattccatttatttgttttatactgctatttgcaatgttttgttatctctactggaaattaaaacttgagagcagagcagtcttagatttgaaccttctgtctgcctatgaaaataatctagcctatgaaaataatctctctgaacctctaaattcagatttctacctgaataattaaccttttgtgaaacagacaaaaaatattggcaaacttttcatctattctaagccaaattgcactgttgtgtgaaaaattactcctagtatttatccttatactccagcaggaacatgggggttcactgtagtatatttaaagctttttatacattctcagaggtatgataattatagaaaacttagaagcaaacaatttttatgtcgaatggaaaacagaaaactctggtgttaccatagattaaactgcttcccaaagccattgagtaacttgcccagtagtgaagtgacttagtagcagcatctaaactacagctgttgtcatatttcttatctcaatgctcactgcatagtaaacagcttaaaataaagttttcaggactttgttgaacctcgtcattcagaatcctctgtcagccatatactgaataacttcagtatgtagctgatggatgcaatcccaactaatatacaagcaaacgggtggtgattgtatttattcagacaataaaattgaaatatcctgagttatgtatagataaaagttctaaaggtccaaataacccttttcaactgttgctttttacagtactcaattttgtttttgctttgtttgttatgttttgttttgagacagggtctctgttgcccaggctggagtgcagtggtgcgatcatgtctcactgcagcctcaacctcctgggctcaaacaatcctcccacatcagcctcctgagtagctgaaactacaggcgcatgccaccacactcagctaattttgtatttttggtagagacagggttttgccatgttgcccaggctggactggactcaagcgatctgcctcagcttcccaaaaatgctgggaattcccagactcaagcaatcagccccagcttcccgctgggattacaggcaggagccactgtgcctggcccaatactcactttttcttacctgcagttgtaagatagttgctatgcaatctgatcccttttgtctcacattatgaaaatatgttcctatgttgaccaaaggaaagctcgttaactcaaaatgagaatgatatcctctgaagatgctgtaaacagaattctattcaggaccagagaaatagattgtgtagccttttgcgatctcagccatgactgggcaccaccatcagcacaggtgtaatcaggtaaataattggttatgctatctgcgaggatttcagagatacaagattcctacttgtttccattgttaacaagtccttccaatccaatgatagtgataagaataacaattcaaattacttgaaacttctgtgtgcaagataatatttcaacttttttttttttttttgagatggagtctcactctgttgcccaggctggagtgcagtggcactatctcagctcactgcaacctccatctctcaggttcaagtgattctcatgcctcagcctcctgagtagctgggattataggtgtgtgctaccatgcccagctaatttttgtatttttagtagtgaaggggtttcaccatgttggccaggctggtcttgaactcctgacctcaggtgatccacccacttcagccttccaaaatgctgggattacaggcgtgagccaccacacccagacaatttttcaactttttaacaaaagttctctcttttagagtggatatgtaaagaggttactggatatttgaaagatggggaaattttgccccaaaagttagcaaagcagaatataagaatgagttgtactacagtctccccagtacttttgttctcatgcaggagaaatttggggcaaaatttccctcactgctgtggatcatggacattacctataacagaagtgcatttaatacttttgtaattgctgaacctcagtgagaaagagtagaagttaattgaattcctcccttctagaattttcattagtcagggcttcttggagagtttgtttttggctgtattctagcagagaaatgccagatacagggctggtcagggaaagccactggcccaagtaaggagaaagcatatgcagtgtcctcagtgatgaggtatctcttgaacaataatttgaaaattattttagtctccaatattacagctagagagaccttataacttatcacccaaacatgaactcttttgaagactgaagggttctattagtaattgtgtcagaacagcaggagtaaactcgcagtcctgtgcaaactgagatatgcagtgaccctaattatatagactgagggtattttccaacacttgttaattcaaggaaattgtgaacttgtgaaatctctttttatggattccatttgttctgcttttcagaattcctataatgagtggcaactctttttgatttttttttgtcaataagatgccgaatgcccaatgcccttgcattccagtctttagaaaatgtccatgtagattaatgtagatcctgttttaaaaatttgttgagataaaagtctaaattcatataagattgtttcagttataaagtctaaagcaatgcttgtctttatagtaaaacatacagtatgaatatgtcctcacttaaagttattatataatacataataatctttattaataataaaaagcattatatttgttaaaaattagaaaaagcaaggataaagttaaatatcaaaatctgatttttctccctctttccatttccattccccagaagtaacagcttttaacacttctgtatacttccaggtaattttatacatatatgaatactgaccaatatgattatattcccttatgtaaacacatggaagcatgctaaatacatgttcagaaacttgtttttttccttaaggatttgaatgtttttgtacatgtatatctatatctgaatttatatctataccacattcctaattttattgacagctgcatagcatgtcaataatatgcagctgtcaataatatgcagggactcatttgagaggctataaaagctttccctgccattttatactgagaactgtagaataagtgagcaaaattgaaatacatattgaataatagtttaaaatttatgatcctatccttaaattgacatttttacactaacaaaattataataaaacaatagagggtggtggtagcaagatagatgatttggaaatttttaactggtagcattgacttatattagtacttagcaaatttagggctctgaacagcctctgccccgaatgtctcagagttcctgtgtcatatgatactttcattcacattgctgtgtgccattataccaggtaatttacattaaagatcacatttatacttcacatcagatagttattattatctctgttgttaaagttgatggtattggagttgtggagagaacaagataaatattacctcacagagtcattttttattggcaaccccaggacatttaaagttctgaaaatcatacataatttttctctgagcatcagaagatgactacagttccttttgtctacactttgtaccactatcccaggaaggtattattatactcattttataggtgaggagcttgaagctcacaaagagtaagaaacattcccaggaggatgtaactaatgacttatgtagtagggacatggacccagacttgtctgcctccaaattccatgctactaatatctttttattctaatttgataaggtcttagaaggcaaaagatgtttccctgagatgtgtctaatagcttgctacagcctatatgcatagtttttgaggcggtctaaataattttaattgtttcacatcgtatgttcccattcataagtgggaactaagctatgaggaatgacacaatggactttggggactggggggaaagggaaggagggagctgaaggataaaagactacacattgggtacagtgttcactgctcaggtggtgggtgcaccaaaatctcagaaatcaccactagagaacttattcatgtaaccaaacacctcctgttccccaaaaacctattgaaataaaaaaaaatttaagaaactaacaaattgtttgtttcagatgacaaggcagtttccttaacattgagaaattagagtgaaaaaaatgtgttagagattatgaccgaatctaataatagctatctatgtggacagtattacaaaaattaaccaaatgacaaaaaatcaaagaagaaattttgtgaaagttgtttaaaatcaggaatctactttttacattttagctttcacttttgcagtgatgatacagatatagaaagattaaattttagaaatactttggtaattatgagcattttcaactgtatatttttcatgtaataaaacaagcaatatcaattctgtaaatatcttcaaacaggtagtaaaatgactataagtaactgaaatagttaacaaatatgtgttaattgacttcctgaatttttctgtttcaggaaaccaagagttgaaacattaatcatgaattgggtaaatgacagcatcatacaggagtttattctgctgggtttctcagatcgaccttggctggagtttccactccttgtggtcttcttgatttcttacactgtgaccatctttggcaatctgaccattattctagtgtcacgcctggacaccaaacttcatacccccatgtatttttttcttaccaatctatcactcctggatctttgttacaccacatgtacagtcccacaaatgctagtaaatttatgcagcatcaggaaagtaatcagttatcgtggctgtgtagcccagcttttcatatttctggccttgggggctactgaatatcttctcctggccgtcatgtcctttgataggtttgtagctatttgtcggcctctccattactcagttatcatgcaccagagactctgcctccagttggcagctgcatcctgggttactggttttagtaactcagtgtggttgtctaccctgactctccagctgccactctgtgacccctatgtgatagatcactttctctgtgaagtccctgcactgctcaagttatcttgtgttgagacaacagcaaatgaggctgaactattccttgtcagtgagctcttccatctaatacccctgacactcatccttatatcatatgcttttattgtccgagcagtattgaggatacagtctgctgaaggtcgacaaaaagcatttgggacatgtggttcccatctaattgtggtgtctcttttttatagtacagccgtctctgtgtacctgcaaccaccttcgcccagctccaaggaccaaggaaagatggtttctctcttctatggaatcattgcacccatgctgaatccccttatatatacacttaggaacaaggaggtaaaggaaggctttaaaaggttggttgcaagagtcttcttaatcaagaaataagaaatatgcaaatgataagctttgctaaagacaaaatgtttacttagcttactaacttctctgtaagttgccctatttttgttgttactgtagagaacaatgtaaactccctcaaataaaatttccttgatgaagagctatatttacttctgttgccttaatgttttcattgaacaagcccccagaattgaccttccaattcaccaaaaattgtaatcacaacatcttcaaggtttgtcaaacatcccatcaatgcttgtacaattcaatgtaaattagatccgtagaaaagccagaagttctttctccaatatcacacacacacacacacacacacacacacacacacactagttaaacgaggctcactgaaactctcaaaccccaccacttcaaatttggatctgaggttaacaattctaattttaaattttccactcccgcatcagcataaggaaatctataataatttttattctaaaattgtaaccagattttccattttcttaccatatttctgtactcatgtttttcctactaaatgaaggcattctttttacttcctttgcaaatcaaaccctagatatttattaggtccagctaattttcttttacatgaattttttttcataattctcccaactatcaatattatctaccgttctcttaaaccctaaagcacttaacagcttagattccaaaatagcacattatgtaatgatttccaaagagttcttgtttagtacttttgtcttgcataataatagtctaattatattttattcttgagggtacaaaaactataccatacattttaccacaacacctttagaagtcatcatagtgctgaggaagtagcatgcatttacattattagttgattcttttgattgttgagtgattcatttacattataataatttaacaaccttgctacccttctttatccattgttttcttctactaatgcattatacatgtagaaaatacaatagcttaaaatatatttatcatgtttcttatgaaaacctacagtaactccatgtacttttgccataataaaatgttaacagagaaataaatctggtttgccaagttctgacttcagttttctctcctaatagggataattatcataaaaaacatacatggaagcaaaatactgataaagtatatttaaagcttaagacaataattttctcactgaaaattaattcattgctaaaggtccaaataaatgacagatcagattactggagacaaatgtgtatctcaaagccaatgtcagtgtagtttggtgaattatgaggacatagaagagaaaacagaattccagaaattgaaatagttaatttttaaattgagaggttaattgatttaattaattttataattgtagatttggtttttaactagtatttatattggtgtgctggtgtataattttatactggtaacttctgtaactaagctattatcagttaccttgagaatataaaaaatatattaattattcatatagaacaagacatattaaactatctctccttttttgcaattctgagaaatttatttttctaatacaaaccacttttaagtttttaagtggtttgtattttaaggagaatgtattttggattttttttatacttgtagtaaaatatacataaaatttgctagtttaaccatttttaagtgtacagccagtggcattaagtgcattcacattgagcgtcaatctccagaattttttcatctcctgaaactaaaactctgtacccattaaacaataactacccatattccatattctgtccccaccagcctctggtaaccactattctattttccatctatgattttgaatactctagatacctcatatgaatgaaatcatagagtgtttttgctttgtgggttatttcacttagcataatgtctttaaggttcatccatgttgtagcatgtgtcagaatttcttccctttttaagactgaataatattctattgtatgtatataccacatttggtttatctattcatcagttgataggtacttgagttgctttcaccttttggctatgttgaataatgctgccatgaatatcggtgtataaatatctgtctgaattcctgctttcagttatttagggtatatacccaaaagtggaattgctagatcatacagtaattctacttttaattttttgacaaactgctatactgttttctgtaatggtggcatcatttttcattctcaccaactgtccacaagggctataatttctccacatagctcattttaataaagttaatttttataaagtgttttgtgatatctattttatgacatagagaataaccagaaaatagtagaattctatttgttcatatctatttctatatgctcactcaaaagttgattaatggaaattactcaagaagagaggttttattgtattaggacataaatattcaaatataagagcaatcgggtccaaccaccaatggtaaactaaatctagggaataaaacaacatcatattttggaggctgaggcaggagaatcactggagcccaagagtcaaggccagcctgggtaatataacaagacccatctctaaaaaaataaaaaataaaattgaacatcaatgcaaaagcttttactacatgttatattctatgtaatagtagaaattataagattggcagtgactcttataaagatagaaataaggacatatattcatggtaccacatgtagattattgaattcagttcaattcataataatccttataacagatatacctatcctaatagggagtttttatggtaaattgcatccatgataaccatttccattgaggtccagagaaacaaaatgtgaaaaagaaatgacagataaattgaaaaatttgggaaaatgtcacatagaaaaggagttagactttacttgttggtttctaaaatagaaagaacttgtaagaagtacgtggagacaatattggttgtatggacggacttgctcacagtcagtagaagacaaaaattgaatgatttggcttcatgaataataaaatttcccggccaggcacagtggctcaggcctgttatcccagcactttgggaggccaaggcaggcagattacttgaggtcaggagtttgagaccagtctggacaacatggtgaaatcccatctctactaaaaatacaaaaattagccgagcatggtggtgcacacctgtagtcccagctactcgggaggctgtggcaggagaatctcttaaacccaggaggcagaggttgcagtgacccaagatcatgccattgcactccagcgtgggcaacaagagcaagactccgtctcaaaaaaataaataaataaaaatttaaaaaataaaataaaatgtccttagcaacagttattcaagtatatcactttgtggaaatatttcatatggtattcaaatactggaaggatggttggattacataactgataagatgatttctaacccagagattctgtgagtatgtgagtataaataaagaaggaatttaacttaggaacaaaataactgtctagagccaaaagttctgatgttttggaatgtttagttaaagattaggatgaatagctatctgtagacattcataggctgaagccatgtagcctattatcctctgattaagcagcataacattaacttgctttttattgttgtatgacttttagtaaatttatacagttgttcaccagttgtactttatgattgtttccagttcggattattttgagtaatgtttatatgaaaatgcatagacaatgttttatatagatacattttcatttttcatgagcaaacatctaggagtagaaatgctaggttgtatggcaaatccatgtatatacatttttaacaaaatactaagctgttttctaaaggattataccattttatattttctccagcaacacatgagggttttaatttctccccatcctaactgacacatgttttcagccttttggattatagccattctagagtatatgtaacaatatctcattatgtatttaattagcattgtctaagtggccaacgatgttgagcatattttcatgcacttattagccatttatatagctccttttataaaatatacattaaaatattttgcccatttatcaaatgaattgtcttattattatcaagagttttctgtatattgtagacacagtcttttatcagatacatatttagcaattattttctcctaatctgtagcttttttgtttcttttttatttttgacagagtctcactctgttgcccaggctggaatgcagtggtgcaatctgggctcactgcaacctctggaggctgagttcaagcttatttcatttttaacaccttcattgagatataatttgcataccataaaactttctcatttagaagtactgttcaggccctgccaggttcaagcttgtttcatttttaacacatttattgggatataatttacataccataaaacttactcattcaaaagtacagttcaggccaggtggggtggctcatgcccgtaatcccagcactttgagaggccgagatgggaggatcacttgagtccaggaaggtggaagctgcagtgagccctgattgcgccactgcactccaatctgggtgacagagcaagaccctctctcaacagaaaataaataaaataagaagtacagttcagtggttttcaagtacagtcacagaattctgtaatcatcatcacagttgaattttagaaattataattatcccccaaagaaaccttgtgtactttcgcagtcactttccatttcacctgctcttcacttccaacccaagccattggcaaccattaatctacttttcatatggatacattagcctattctagacatttcatatacatggagtcatataatatacagccttttgtgactggctcctttcacttaactaatgttttcaaggcccattcatgttgtaacatgtttcagtacttccttcttttttattgccaaataatattccattgcatggatatacttaatttcgtttatccattcatcagttgatgaaaatttcagttgtttccactttttggtctttatgagtaatgtcactatgaatatttaagtgtaagtttgtgtagacatatgttttcatttctgttggttatatattctacataggagtgaaattgctgggccatatagtaacactatgtttaggtttttttttttttttttttttttttaaacagagtctcactctgttgcccaggctggagtacagtggcacaatctcagctcactgcaagctctgcctcctgagttcaagcgattctcctgcctcagcctcccgagtagctggaattacaggcacccgccaccaggcctggataatttttgtgtttagccatgttggccaggctggtctcaaactcctgacctcaagtgatctgcctgcctcggcttcccaaagtgctgggattacagacgtgagccactgcacccagccactatgttttccaaagcagctactctattttaattcccaccaacaacgtaagaggatactaagtttccactttattgaaaacactttggtattgccatttttctttattatagacacgctgttggttgcaaagcagttatcttgtggttttgtttttatttccctaatgactagggatattgaacatcttttcatgtgtttattggccatttgtatatcttctttggagaaatgtgtagtcaaatcatttgcccactttttaagttgagttatttgtctttttattattgagatatagaagttctttacatattctgggtacaagtactttgttggagatataatttgcaaagatattctcctattctgtattttcaatttcttgatggtgttccttgaagcacaaagtttttaaattgtgatgaagcccaatttaagtattaagaaaccactgtgtaaatgaagaccataaaaatttttacctgggttttcttctagggtcttatagttcagcctctacatacatttaggtctatgatccattttgagttaatttttatgtatggtgtgaggaaggagtccaacatcatctttttagatgtgcatatctatttgatgcttgtcccagcatcatttgttgaactgactattatttcctcaataaattatcttggcacccttgtcaaaaatccattgaccgtaaatctgaaagtttatttctggactctcaatttattccattgatccatatgtttacttttatgcctgtaccgtgctttctttataactgtagttttgtagtaagtttggaaattaggaagtgtgagtccttcaactttgtccttcattattaacattgctttgactattttgtgtctcttgcatttctatattagttttaagatcagcttgttgatttctgcaaaaaaacaaaacaaaaaacaagaaagccagcggtgattttgttagagattgcattggatctatagatcaatttggggagttttgtcatcttaataatattgttttccaacccatgaacatgggatgactttccatttatttaaatctttcatttctttctacaatgttttatagttttcagtgaacacgacttttacttcttttaacagaggtccaaaagaggtcaaacctctctactgactgcaaggctgccagagtttgaatacgatgccactgagcttgggatccccaagttaaaatatcacagacccctactagcttactaagattcagcagtttctcttggatagaccatttaagtttgtttgttctgtgccttagctttatttccaaagttccagaaaagacaagtcacagatcgggagaaaatatttgcaaaacatatataccatgacccatgaggcccctcctctgccactgccactgccactgccactgagatggtgtatctcacttcctacctattaccttccctcatgagcaacacctcccttagtgccaaggacattaagaagatcctggacagagtaggcatggaggcaactgatgactggctaaacaaggttatcagtgagctgaatggaaaaaatattgaagatatcattgcccaaggtattggtgagcttgccagtgtgcctgctggtggggctgtggccctctctgcttctctgggctctgcaggtcctgctgctggttctacccctgctgcagaagaaagatgacaagaaggaggagtcatctgaagagttggcctgttcaattaaattcctggtgtcctacaaacaaagacttttcacattaaaaaaaaacaaacaaaccagtgtgtgtgtgtgtgtgtgtgtgtgtgtgtgtaatagaggctttgtattcaaaatatacaaagaactccaaagttcaacaataagaaaacatgtaaaccaattaaaaaatgggcaaaatatctgaactgacaccttaacaaagaagacatgcaaatggcaaataagcatgtaaaaagatagtcaatgtcattttttattaggaaattgcaaaccagaaaacagggagataccactacattcttattagaatggactaaaatctaaaaaatcgacaataccaattgctagcaaggatgcggagtggcagaaagtctcatttatttcttgtgagatgcagaagagtacatcaatttcctgatcactgcaattcattccatgacccacatagatatttttctccccatatgttagggaagcagatctctcatggtcttcatggacttctctttctgagtggaaattcacaagggtatcttctagttatctattccaatctcccccaccctcatctagcatcttgaagggtcttggttgctgacctgggattgtgacccaaaccttcatttctaaaggtctgaacccttggtaatcatgaccttttcagtctgaagttgctgcacctgtctattcatagttatgatggaacacaggaggtagccaagtagatctcctgtgctccacatgaatgattctgcggccctattgtctaaaatcagccctgcttcttcctgctgatcagagtcaatttcccctgacagtatggtatggtagttatctattactgcataacaaatcaccccgaaacttactagcttaaaacaataaacgtttattacttcaccatttcttttaggttaggaatcgaggcacagcttagtggggtcctctggctccgggtaggtctcacacaaggatacaaagtgttggctggagctacaggcatcttaggtcttaatggggtttccaatctcacccactaccagttggctggtctcagaagacctacttgcagggttactcatttaggcctattcatacggctgctccatgacatggaagctatctttctccaccatgagtaatccatcagaaagagtgagagagagtgcacctaacatgaaagccagtctttttagaacctaacatcttggaagtgacatcacatcacttctgctttgttctaattgttagaagtgagtcaataatgtcacaggatccttcaggtgtcacttcgccagccagaaacctctgtggccgttggcgcctctgcttgagtttagctcatgcccactgggctcattttgcccacttggctaattttgcccacttggctcagcaggctgcactcggtttgcactaccggcccagatcccatgcccgccgagggtgagccaggcacagagcagtgaagggtgtgtgagtgagcgtggtgtctggccactgtacacagccaggcgcaccgtctgctgtggcggagtaagcagctcctagtgccggctccatgcaaggctgtggctggaccaggtatacggcaagcagcttcccctgcaggcaccgggcctggacgaggggaatgcggtggcgcctgaaaacttgacgatgccacaatgtcagagccccaaggggtgttgggcggagcacgtgctacatctctctctttcccgccacctgcagcttggtaaatggatgcagggtgggtttcagcccgttgtgttgcggcttgttcagtcccaccaccccactccagcccacagctcttgggctggcccagccacacggctgcttcccattgcatggggcagccaccccacaccagtggaggtgggtagggctatagtgttacagctctggcagggggaatcccgaggtctgggccctcagaagagtcactagtcaccaggcttcactcccacagtttgacaaacaggagtgtgtcactgcccacatagcttagcgagccagccagggaagtgttacagcccttttcacgcctgccattccatgggtctcgagttcttgacctgtgtccaggaagaatgaggttatgtggacaactggagggtgtgcaaggtgaagaagagctttattaagcaacagaacagttctcagcagagacctgaagtgggtagctcctattcacaggcagggttggactgaatctggggtttttatgggctcagaataaccccaggaaggttattatgagcccgtcctcgaaaaggaggaagtacatgctgggcaggagaattggtccatggagaaagtgcacgttgattggtcaatgggtgggccaggaaaaagcatcacctgattgtccaaaaggcatcaaggaagttcttactctatgtcttggactccatctggaactggcaacccaacccccaggcttcaggccatccttggcttgaaggtcgggcctcactgcagacccgccccttcccacctaggaacctatctgcctcctgccatcatcaataagactaactcatacttaatagaagggattacacagaggggaatatagcagtaaacacaatacttaatggaaatgaaaatatcaaagaatggaaaaataataagcagttaacaaacataatagaataaataatccaatgttcatctttttcactgtcttggataagatagtaattgtgacacaatattgtaatttcctcattcttacctttctctggattgtgagatccttgagggaacatatgtaacgtttatttacatcccaagtgtctttcacagtgcctgaaaatgtttaatgaatagaaatatattgcatatcccagagtcattctgcattataagattttatgggaattattcctgaaggataagcatagaacaaaaaagtcagtgatagagaatagctctcctagatactctcactaaatctctactcatcaaaatgccatccagaagtgaggggatgattatttgagttataatgggaaagtttcagatttgatggggtgaataataatattgggtaaatccccagggctgctgaatagctctaagatgcaactgtaaagcaaagggaagacaacagtgacaggagctgactcactttagctctccactgtaatcagtcattaattgactgtttctcttctaaggcagataaccccagagagtgttctattttatgaattataacaaaagtcatttgaaactttttaatagttgcatgcagcataggaagaacatgttaatcagttctactctcccaagagctggatccctgtggacatggagaaaacaagatcattgctgttggtagcttaattctaatagttattacaatgagatatctagggtcttgttcttccttccaacttttataaagaactgcagaaggtgaaaatcaatttcccacttgctctagttttaaatattacccattgatgtcatcactcagaatcccttaagatttttcagttatgcagagagaatcacatgagtaaatgtagccatctttcaattttaccagaaaaaaaatggcctaagaaaaacttattttatcaataaatccaaatatttctcattctttagtctctccaatctataattccatctttcttttctcaactccttaactatcagggacaataagtcaattgttaaatgagttagtgggttgagtatcttttctttttacttagaagacagagaaaacatgaaaaaacaaatgacattaaactgaagcttaattttaaaaatttacttccaaaatttatttaacccttttaaatgttaaagtaacatatagtcataattatatattacattttcacatggttatatgttaacttttttatttttacaagactaaacagggaaaattaaaaattcacttctttgaaactcccgttatctttgcatatttatgtaaatcatagtattttagaaattgaagaggaagaaattcttccaaactcattctacaaggccattgttactcttataccaaaaaccagacaaaatgcaacaaaaccagaaaactccaggccaatatccctaatgaacatagatacaaaaactcttaaaaatatagcaaaccaaattcaatagcacattaaaaagatcattcactatgatcaagtgaaatttgtcctagggttgcaaggatggttcaacatacacaaatcaataaacatgatatatcatgttagcagaatcaaggacaaaaactacatgacaaataaaaggcatttgataaaattcaacaggctttatgataaaaactcttgaaccaggtgtacaaggaacatacctcaaaacaataaagtccatatatgacaagctgacagctaacatcatactgaatagggaaaagttgaaagcttcatctctaagatttggaaaaatataagaatgcccatttttaacacatttattcaacatagtactgaagtgctaatcagagcaagtaggcaagacaaagaaatagaagacatacaaattggaaaggagaaagccaaattgtccctgttcacagatgacatgaccttttatatagaaaccctaaagacaccaccaaaaaaactgtcagaaccaataaactaattcagtaaagttgcaatatacaaaatcagcatccaaaaatcagtagtgtatctatatgccaatagcaaactatctgaaaaaaatcaagaaagcaatctcatttataatcactacaaaaaaaagatacctaggaataaatttaaccaaggaggtgaaagatcactacaataaaaactataaaacattgttgaaatatattaaaaagtacacaaataaatgggaagatatccatgtttgtggattgaaagaattaacattgtttaaaagtctatgatacccaaagcaatctatagattcaatgcaatcaaaatactaatgatatgattcacatagaaaaaataattcctaaatgcatgtgaaaccacacacacacacacaaaaaccccaaatagctaaagccactttgaactgtgcttttgcggtctttgaacaagaagaataaaagaaaaaagaataaacctggtggcaccataccacttgacttcaaaatatactacaaagctatagtaaccaaaacagcatggtactggcttaaaaattaatatagaccaatggaacaaaatagagaacccagaaataaatctacacaattacagctaattggttttctacaaatgtgccaaaaacacacactggggaaaggccagtctctttaataaatggtgctggaaaaaccggatatccacatgcagaaaaatgaagctagatagaccctatcttttcatcatataacaaaaatcaactcagaatggactcaagatttaaatgtaagacccaagatgacaaaactactagaagaaagcatagaggaaatgctttataacattggtgtaggcaaggatctttggataagacctcaaaagcccagaataccaaaacaaacaaatgagattacatcaagcgaaagagtctctgcacagcaaaggaaacaatccaaagagtaaagagacaatctatagaatgggagaaaatatttgcaaactattcatctgataaggggttaatatccagaatgtataaggaactcaaaccactccttagtaataataataattaattattattatctgatttaatgaaaaaatgctcaacatcactaatcatcgtggaaatgcaaatcgaagccacaatgagatatccccccaccccaattagaatggctactatgtaaaaaataacaaataacaaatgctagcatggatgtggagaaaggggaactcttatacactgttggtgagaatataattagtacagcaattactgaaaacagtatgaagcttcctcaaaaaatgaaaatagattaaaattaaattaaatcaaattaaattagattaaattaaaatatgatccagcaatcccactattgcctatgtatccaaagaaattaaaatcagtatgtctaagagatatcttcactcccatgtttattgcagcactgttcacaatagccaagatatctcatcaacctaagtattcatcaatggatgaatggataaaggactgtgcatatatacacaatggaatactattcagtcataaaaaatgaaatcctgtcatttgtggcaacaaataacatgcatttgttggacttcgaggacatgcattaagtgaaataaacaggcacagatagacaaacaccacgtttcactcatatgtggaatctaaagaagtctatctcataggaataaagagtagaatattagttaccagaaactcctggaaaccagtagttaaccaggagaggggagtatgaggagaattcagtcaattgatacaaagttgcaataagatagagtagtaaattctaatgttcttttgcacagtagggtgacttacggttaataagatcgtattgtagatttcaaaatattctatattaaatattactctatattatatgctaaaacattatattatgtattaaaatatgtatatttttctacagctagaagagagaattttgaatgttctcaccacaaagaaatgataaatatatgaggtgatggcatgctaaataccctgatttttttttttttttcctgagacgagtctcactctgtcgcccaggctagagtgcattggtgcgatctcagctcactgcaacctccacctcctgggttcaagcgattctcctgcctcagcctcctgagtagctggtactacaggcacgtgccaccatgcctggctaatttttgtatttttttagtagagatggggtttcaccatattggacaggctggtcttgaacttctgacttcgtgatctgcacctcagcctcccaaagtgctgggattacaggcgcgagccactgctcccggcctaaatgccctgatttgatcattatataatgcatacattgcaaaatatgacactatacaccataaatatgtacaattattatgcatcaatttaaaaatattttttaatacaaaaaatttttgaaagaataaaaagcataaattgaaaatccacttccttcaaaatccagttatcttggcatattcatgtaaattataatattttagaaatggggatgcattatagctgaaattttgaaacacaatttttcaaaagttaatgtattttatttaatatataactatattttaataatttcaattttaatatagtattctttaacaatttatatttactctctaatacgttttaatatgtttaaaaatatatttgaaatatttactatgtaatacactcaaaatatgtttaaaatatttttgtttagcttccgtatcaacacacacacacacacacatacacacacatgcgcacacacacatacacacacatgcacacacacacacgcacacaccacatttttctgtgactttatactttttatttatgaatgtacatatacttaaccattattcagtcaatgaacatttagtctgttccctttttttatccacaatataactgtgctatgtatatatctttttgcacttatgtaagtatttctaataataaattcctgaaagtggaattattgggttaaagacttgtgcatttaccaaatttccaaaaatctggcaaaactatcctccaaaaatttaaaactgatttacattctcacacacaatttatgagagtgccattctctattatcatagactgaatatgacccaactgaaaagtatgtgcaacatgacaccagaaaaataattactgattgttgtgttaatttgtacttatttaattatgcattaggttgaaaaaatattacatgttttacgaccatatgcattacaatttcagtaaattgtatctcactatcctttacccatttgccttgcccaggtaagcttaatccttttgatttgaaaaagcttacaaattggaaaaagttctttgatcactaaaaatatttgctgtctgttccacaaatgtgttgtaaatatttttctctgttttcaaaaacagagcaggattcatctggaaacgtattgagccattgtgatttgttcattggccataatacttgattcttacattcctttttacttcactctattttgataacaattatgaaatgatacaattttaaacccagataacatatacatgttctgcttctgaaattttttttttttttttttgagacggagtctctctctgtcacccaggctggagtgcaatggcatgatctcggctcactgtaacctccacctcctaggttcaagcaattctcctgcctccgcctcctgagtagctgggactacatgcacccgccaccttgcccggcgaatttttgtattttcagtagagacggggtttcactgtgttagccaggatggtctcaatctcctgacctcatgatccgcccaacttggcctcccaaagtgctgggattacaggcgtgagccactgcgcccggcccgaaataatttttttagggtcagtcatgagtttcaaataacatcgatttgatgaaaacgcaagctttcatctctcacagcaatgaatgtgctcaatgtttcttcttaagctatgcgccttcctaaagaaatctctctaatccttcacttctcttagagacaatattatcattttggaggttcttgggggccaattttaccttctccaaagggtaatcagtgtgacttcagttttttgtttgaatataatttattgagcatcagtcaaccaaatttcatgtgtttattttgtatgtcatacattccagtaactttaccaatcgaacctgtaaataaaagttacaaatgaagtgacaatggcaaaaaaaaaaactctttggatttaatataattttcaattgaaaattatattcaaatataaataaattagactttaatattatttcctaagaaaactgacaaaatctcaattttggacaaagaagtgttcaaatattgttcatatttgccctatgttgccaaatgtatttttttgccccaccaaacaccaaaaatattttaccatagaaataaaaagtcaaattttaaggatatgaacagctatggcccagactaaaacctaaaaatggtcctaagagtttttattcccaatcatctgatgatttccctgatgactccatgatttcccataagaatttactcttctatttccttctgcagcactagttaattacccaaaggagcatgcaacccccatgatctttgcaagaaaatacgttgtgccaactttcaggtaccacttttgatcctaagaaataagccctccattttcttccccatctgggtctataagacctttcaaatctgccttggttattttctggagtcagcaggacatccttgtcttggagctttggttgacaactccagaaagcctggtgaacaccaggtatttgtcccaaatggcaggtagacagaggaagaatgtgaacactgttttctattacaattgcctcttttctccataatttaattaccccattgcaattactccattttacctttttctgaagtagtgcaacatcattactctatcacttacatcaaattgtaagaaaaggaatcacatggctttgttcctcttttatcttcagaaaaaaactagaatctaatgcagagaagagagtttggggcttgtcaccttgtttcttgacaagttgagatcattgtaatcacttccatatgatttctggtgcattcgtatcataatcatactgttactttctatttctattaaccacataatcttccacaaaatcctagataacaatccaagccagaggaaataacatgaacatttcttcttcctgtatactttgggaaagttgaaaccaggtaagcctaaatgaccagagaaaatagggaaatttttcttttactttggtatactgtatttgactatggaaaataaatttactataagaacgtcaatgtcaagacgttttcaccaaagacaagtttttcatttgaaaatcaaaatatctgtgataaaaatttaagtcctactctgtatttattttttctcatttcctaattgaatatactaattagaagcagcccttaattctgtagattgcattgtagtgtgaggtatatttcacacccatattgtacctgctgttctgctattttcacacttctccttttctctgttatttcacttttatcctagtatcctttaacccagttatgagtgtgtgtctttatgaatcgatctgactttattcttcttagccatgttagggtcattttttaaatttatgtttttaaatgatgctttttaaattcctttttatttaccacattctccttccctttgtctctactcgtccctattgccgtgcacctctcctctgtaagctaatcacattgttttttaacatttgcaaaaggctaactgaagataaaatatattcaaaattgccattttattaatggacagaatatgctccctgactttggcaatcttggttgcaaaattctcttgcttacaaagacatgaattgtagagatcaaagttgacagtaagtatttcacgggaataaagaactgtgatatttagtagatacagttataacctaagtgaaaagataacattaacactgtaaagtagatgcatacttatgccacagtaattagatcataatagttcagctcatggtgggcagtaatttccctgtgtcttgtgtttttcaaaaatgcaagtagtgagctcagccatggtgtcacattttcaggtcattgtcaacattgagggcatgtagaagacagctattaggtgacaatacatttgctaaccttgtttataagaacagttgaaggaaagtgaatgtcttagactacagaaaatttagtcaagatgtagtaaatgcctataataggttaatggatattggccaggtgcagtggctcacacctggccaacatccattcagttcagcactttgggaggccaaggcaagaggatcacttgaggccaggagtttgataccagcctgggcaagatagtgagaccttatctctacaaaaacatgaacaaaattagccgggcatggtggtgtgcgcctgtagtcccagctactcagcaggctgaggtgggaggattgtttgaacctgagaggcagaggttgcagtgagctgaggttgtatcattgcacaccagcctgggctacagagcaagaccctgtctcaaaaacaaacaaacaaacaaaaaaacagttaatgatgtaataggaagaggtattagattgatgtgtattcaataaatttaaaatagtttgtcttgtgcatcatagggagaaaatgtctacttaataaaaagaggattataaataagaatttcccaacaatgaaacactttgccttatgtgtttgaacaaatgataaacagcttatatagctagctgggcagaagatatgctacaattattgaatgggttgttaggcttgatagttatatgtcccccccaaatcctgacattcaatggtattcacatattgcagattaaatattcttcattttgtccctactagctatacagatgatgtgaaaggaaggcaatggaaaaatccaatgtcagctcagtgtatggttttatcttggtgggtttctctgatcgtcccaagctggagatggtgctctttacagtaaattttattctgtattcagtggctgtgctgggaaattcaaccataatccttgtgtgtatattagactctcaacttcataccccaatgtacttctttctggcaaatctttcctttctagatctctgcttcagtactagttgcatcccacaaatgctggtaaacctctggggccctgacaagactattagctgtgctggctgtgttgtccagcttttctctttcctttctgtcaggggaattgagtgcatccttctggctgtcatggcctatgacagctatgctgcagtctgcaaaccgttgcgctatctggtcattatgcacctccagctgtgtctaggactgatggctgcagcctgggggagtggactggtcaatgccgttgtcatgtcaccactaacaatgaccctctccagaagtggccgccgccgagttaaccatttcctctgtgaaagccagcactgatcaagatggcttgtttggatgttcgtgcagtggaaatgctggcttttgcttttgccgttctcattgtcctactgcccctcactcttattcttgtctcctacggctacattgctgcagctgtgctaagcatcaagtcagctgccaggcaatggaaggccttccatacctgtagctctcacctcacagtggtctccctgttttatgggagcatcatctatatgtatatgcagccaggaaacagttcttcccaagaccaaggcaagtttctcactctcttctacaacctggtgactcctatgttgaatctgctcatctatactttaaggaataaggaggtgaaaggagcactgaagaaggttttggggaggcaataatgaactggagaaatatgataagttgtgaagtcttaggcaaaatatcttttccaaatacatttattttgtgcttataagaaatctagccaatgtatcaaacattcttggatttttaaagtatgaataaatacactgaagtatatccaaaatcaatatgaatcaaccatagctacacttgatatgaataagtcttagcctaataatatttagtaaaaagaattaagtcccagaagaaatgtgaaatgactctcatatagatataaaataaatgtgttaaagatttttattcaactcaatcaatgaggggcccacacagatgtaataagtggttcaaaaaaaagtcaaagaagcacaaatttataaggagtaaatcaatgtggaaatgcatgtgcaaatagaggctaaacttgcttcttccactgtgggagaaggaagtaaattcaatctctacccaacaggactgaatttgtatgtcatagacaagaattattttacattgctatcagttaataatttacaaaattgtaaaatatctgccacagaatcagaatcagattgttcaaagggatgtcctctagaatctggacaatgcataatttttcactgaagcataaatttttccctgtaagttaaatcctgtatcttattcatgttacaacactaagtatatagtctcaagcctcttaattaacctgggtcacacagagaataagtgggatttgcaaatggtgtatatgatgcctgaacctttgctgttaaccactgaataatattgtctttgttatagagtgttggtgcatagatcactcaataatcagccccaggctgtttgtttcatcagtttgtacaatccttcaagcatgagggatatgctaatagactctctgagagaattctcaccacttattaatatcagccatttccacattgtcccatgcaaactccccatccaaatcttttccatgttttggtggtcagctcaatgcaacatacttataaaattgtctgagaatctttgatttaaaaatgttctagcactccttttaacatatggcatttttatacactgaaatgacaggttttctactccatattatacttatgtatttctcatgtatcctactagattgtaagttccttgatggtagggctatttattttcttaatctctcttagcatcattccaggtattaagttgatatcaaagtgccttgcagatagtaagtgatcaatagtagcttggggtgattattaattttaactgattaattatttcttccataaattatttcttcttttttaattgatgccactatctaattctgtctctgttcttcaaaattacaaataaatctataacaatataatgtctcagtttaaagctattgtcaaaagttttatacttttctttcttaattcaatgtaaactatacaataagagaaaaaaatagtcattaaggaatttcttaccatgggtatcaaaagtcatccccatatttttggaataaaaactttttttcttaaatatgcattataaactcaagagaaattatgatgaattctgccacagtctaagaattagtgtttaagaattagtttgagagttagttaagaattagtttgatcacacgtttgaattaactaagagttaacaccacctggacagatcattttcagtgatatgaaagttagttttggccacaacatgttgattatacctctaactctgattatacctctaagtcaattttataaagataaaatcttgatagtatttgttcttggttttaaagagtgtctgcctcaatatgccccaatgtatccaaataaataagtaatcactcccttaatgcaattaatttggtcagtctaaaaagaattagggccagaggtaactttttatgtgggactcaaaatcctaccaatgttacacattacaaatatttatgatttgcagacataacacattcattggcaagtaagtgcaataaatttacaagttattttgccaaaatatgtcaagtaacattttattcacttgcacaaaaataaatatatcatctgtgcaatagaaatatctgatgacaacaacagtgcagcattctcagttccagaagaaaggtgaattggctctcatatagatataaaattactgctaaaatccctgctatgctgcagtctgcaaaacctttgtgctatatggtcattatgcacccccagctgtgtctacaacaacagtgcagcgttggcatgcatgtgacaacagtgcatccaatcctctttggattggcataagaaggatatttctcccctcattaaaatggttttctctcatgcaatttctttatggtctcaagttcattattccctatttgttacccatttcccattgttaaacattaaaaccagcaaaaatattttttaaaaaagcttctgtaaatataagtgggaaaatatatgtttgcaattcatagatgtgctggaaagttatgaaggccagtgggagtgattatatttacataataccaaattttacactgaaaatagaaattacttttaatgaagttactgcaatgagcaggtggaaaaaatgctttaaatgaacttacttttgtctctggtgcagagttgcatataccattttttaaagctacagagatttaagttaggggacatctagaatttctattcttgtgataaatgtacaagcccccataatacgtgttatagatttggtgatttccaaacagcttctacttctctgctttttgtatttgtttcagaagacatcaatagtaatttaatatcttaaaaagccatgttcatttttcatattctgtgttttacagagtatttgtcttgaaataacatattggcagtattcttaagaccgagaataaaaaaaaatgttttgctattcgaggcctaaaatccaactaaaataatttgtaaaggtgtaacagaagaaatatgaatatggaatgagtgccatgtatcagttctaaaataaattttgtagattgtcgatcctataagatctcccttttattcatggtatatatactccctgtaaatgtgttcagaatttttcacaacagaactatctactgcatctgtactgcattgccaaagaaattcttctgttggatctcagaagttcttagtatctttagtagtttttttaaaaggataaactaattcaaacctctttctactagagtattttattgtaagaggagatcattt

SEQ ID NO: 302 - protein, 313 aa, Homo sapiens
MNWVNDSIIQEFILLGFSDRPWLEFPLLVVFLISYTVTIFGNLTIILVSRLDTKLHTPMYFFLTNLSLLDLCYTTCTVPQMLVNLCSIRKVISYRGCVAQLFIFLALGATEYLLLAVMSFDRFVAICRPLHYSVIMHQRLCLQLAAASWVTGFSNSVWLSTLTLQLPLCDPYVIDHFLCEVPALLKLSCVETTANEAELFLVSELFHLIPLTLILISYAFIVRAVLRIQSAEGRQKAFGTCGSHLIVVSLFYSTAVSVYLQPPSPSSKDQGKMVSLFYGIIAPMLNPLIYTLRNKEVKEGFKRLVARVFLIKK

SEQ ID NO: 303 - DNA, 1192 bp, Homo sapiens
cagatccatcaggtccaagctgtgttgactaccactgcttttcccttcgtctcaattatgtcttggaagaaggctttgcggatccctggaggccttcgggtagcaactgtgaccttgatgctggcgatgctgagcaccccggtggctgagggcagagactctcccgaggatttcgtgtaccagtttaagggcatgtgctacttcaccaacgggacggagcgcgtgcgtcttgtgaccagatacatctataaccgagaggagtacgcacgcttcgacagcgacgtgggggtgtatcgggcggtgacgccgctggggccgcctgacgccgagtactggaacagccagaaggaagtcctggagaggacccgggcggagttggacacggtgtgcagacacaactaccagttggagctccgcacgaccttgcagcggcgagtggagcccacagtgaccatctccccatccaggacagaggccctcaaccaccacaacctgctggtctgctcagtgacagatttctatccagcccagatcaaagtccggtggtttcggaatgaccaggaggagacaactggcgttgtgtccaccccccttattaggaacggtgactggaccttccagatcctggtgatgctggaaatgactccccagcgtggagacgtctacacctgccacgtggagcaccccagcctccagaaccccatcatcgtggagtggcgggctcagtctgaatctgcccagagcaagatgctgagtggcattggaggcttcgtgctggggctgatcttcctcgggctgggccttattatccatcacaggagtcagaaagggctcctgcactgactcctgagactattttaactgggattggttatcacttttctgtaacgcctgcttgtccctgcccagaattcccagctgcctgtgtcagcctgtcccccgagatcagagtcctaccgtggctgtcacgcagccaccaggtcatctcctttcatccccacctcaaggctgatggctgtgaccctgcttcctgcactgacccagagcctctgcctgtgcacggccagctgcgtctactgaggccccaaggggtttctgtttctattctctcctcagactgctcaagagaagcacatgaaaaccattacctgactttagagcttttttacataattaaacatgatcctgagtt

SEQ ID NO: 304 - protein, 261 aa, Homo sapiens [sequence omitted]

SEQ ID NO: 305 - DNA, 4760 bp, Homo sapiens
gaaagaggcagcttacacacgccttccagtccctctactcagagcagcccggagaccgctgccgccgctgccgctgctaccaccgctgccacctgaggagacccgccgcccccccgtcgccgcctcctgcgagtccttcttagcacctggcgtttcatgcacattgccactgccattattattatcattccaatacaaggaaaataaaagaagataccagcgaaaagaaccgcttacacctttccgaattactcaagtgtctcctggaaacagagggtcgttgtccccggaggagcagccgaagggcccgtgggctggtgttgaccgggagggaggaggagttgggggcattgcgtggtggaaagttgcgtgcggcagagaaccgaaggtgcagcgccacagcccaggggacggtgtgtctgggagaagacgctgcccctgcgtcgggacccgccagcgcgcgggcaccgcggggcccgggacgacgccccctcctgcggcgtggactccgtcagtggcccaccaagaaggaggaggaatatggaatccaagggggccagttcctgccgtctgctcttctgcctcttgatctccgccaccgtcttcaggccaggccttggatggtatactgtaaattcagcatatggagataccattatcataccttgccgacttgacgtacctcagaatctcatgtttggcaaatggaaatatgaaaagcccgatggctccccagtatttattgccttcagatcctctacaaagaaaagtgtgcagtacgacgatgtaccagaatacaaagacagattgaacctctcagaaaactacactttgtctatcagtaatgcaaggatcagtgatgaaaagagatttgtgtgcatgctagtaactgaggacaacgtgtttgaggcacctacaatagtcaaggtgttcaagcaaccatctaaacctgaaattgtaagcaaagcactgtttctcgaaacagagcagctaaaaaagttgggtgactgcatttcagaagacagttatccagatggcaatatcacatggtacaggaatggaaaagtgctacatccccttgaaggagcggtggtcataatttttaaaaaggaaatggacccagtgactcagctctataccatgacttccaccctggagtacaagacaaccaaggctgacatacaaatgccattcacctgctcggtgacatattatggaccatctggccagaaaacaattcattctgaacaggcagtatttgatatttactatcctacagagcaggtgacaatacaagtgctgccaccaaaaaatgccatcaaagaaggggataacatcactcttaaatgcttagggaatggcaaccctcccccagaggaatttttgttttacttaccaggacagcccgaaggaataagaagctcaaatacttacacactgacggatgtgaggcgcaatgcaacaggagactacaagtgttccctgatagacaaaaaaagcatgattgcttcaacagccatcacagttcactatttggatttgtccttaaacccaagtggagaagtgactagacagattggtgatgccctacccgtgtcatgcacaatatctgctagcaggaatgcaactgtggtatggatgaaagataacatcaggcttcgatctagcccgtcattttctagtcttcattatcaggatgctggaaactatgtctgcgaaactgctctgcaggaggttgaaggactaaagaaaagagagtcattgactctcattgtagaaggcaaacctcaaataaaaatgacaaagaaaactgatcccagtggactatctaaaacaataatctgccatgtggaaggttttccaaagccagccattcaatggacaattactggcagtggaagcgtcataaaccaaacagaggaatctccttatattaatggcaggtattatagtaaaattatcatttcccctgaagagaatgttacattaacttgcacagcagaaaaccaactggagagaacagtaaactccttgaatgtctctgctataagtattccagaacacgatgaggcagacgagataagtgatgaaaacagagaaaaggtgaatgaccaggcaaaactaattgtgggaatcgttgttggtctcctccttgctgcccttgttgctggtgtcgtctactggctgtacatgaagaagtcaaagactgcatcaaaacatgtaaacaaggacctcggtaatatggaagaaaacaaaaagttagaagaaaacaatcacaaaactgaagcctaagagagaaactgtcctagttgtccagagataaaaatcatatagaccaattgaagcatgaacgtggattgtatttaagacataaacaaagacattgacagcaattcatggttcaagtattaagcagttcattctaccaagctgtcacaggttttcagagaattatctcaagtaaaacaaatgaaatttaattacaaacaataagaacaagttttggcagccatgataataggtcatatgttgtgtttggttcaattttttttccgtaaatgtctgcactgaggatttctttttggtttgccttttatgtaaattttttacgtagctatttttatacactgtaagctttgttctgggagttgctgttaatctgatgtataatgtaatgtttttatttcaattgtttatatggataatctgagcaggtacatttctgattctgattgctatcagcaatgccccaaactttctcataagcacctaaaacccaaaggtggcagcttgtgaagattggggacactcatattgccctaattaaaaactgtgatttttatcacaagggaggggaggccgagagtcagactgatagacaccataggagccgactctttgatatgccaccagcgaactctcagaaataaatcacagatgcatatagacacacatacataatggtactcccaaactgacaattttacctattctgaaaaagacataaaacagaatttggtagcacttacctctacagacacctgctaataaattattttctgtcaaaagaaaaaacacaagcatgtgtgagagacagtttggaaaaatcatggtcaacattcccattttcatagatcacaatgtaaatcactataattacaaattggtgttaaatcctttgggttatccactgccttaaaattatacctatttcatgtttaaaaagatatcaatcagaattggagtttttaacagtggtcattatcaaagctgtgttattttccacagaatatagaatatatatttttttcgtgtgtgtttttgttaactaccctacagatattgaatgcaccttgagataatttagtgtttttaactgatacataatttatcaagcagtacatgaaagtgtaataataaaatgtctatgtatctttagttacattcaaatttgtaactttataaacatgttttatgcttgaggaaatttttaaggtggtagtataaatggaaactttttgaagtagaccagatatgggctacttgtgactagacttttaaactttgctctttcaagcagaagcctggtttctgggagaacactgcacagcgatttctttcccaggatttacacaactttaaagggaagataaatgaacatcagatttctaggtatagaactatgttattgaaaggaaaaggaaaactggtgtttgtttcttagactcatgaaataaaaaattatgaaggcaatgaaaaataaattgaaaattaaagtcagatgagaataggaataatactttgccacttctgcattatttagaaacatacgttattgtacatttgtaaaccatttactgtctgggcaatagtgactccgtttaataaaagcttccgtagtgcattggtatggattaaatgcataaaatattcttagactcgatgctgtataaaatattatgggaaaaaaagaaaatatgttattttgcctctaaacttttattgaagttttatttggcaggaaaaaaaattgaatcttggtcaacatttaaaccaaagtaaaaggggaaaaaccaaagttatttgttttgcatggctaagccattctgttatctctgtaaatactgtgatttcttttttattttctctttagaattttgttaaagaaattctaaaatttttaaacacctgctctccacaataaatcacaaacactaaaataaaattacttccatataaatattattttctcttttggtgtgggagatcaaaggtttaaagtctaacttctaagatatatttgcagaaagaagcaacatgacaatagagagagttatgctacaattatttcttggtttccacttgcaatggttaattaagtccaaaaacagctgtcagaacctcgagagcagaacatgagaaactcagagctctggaccgaaagcagaaagtttgccgggaaaaaaaaagacaacattattaccatcgattcagtgcctggataaagaggaaagcttacttgtttaatggcagccacatgcacgaagatgctaagaagaaaaagaattccaaatcctcaacttttgaggtttcggctctccaatttaactctttggcaacaggaaacaggttttgcaagttcaaggttcactccctatatgtgattataggaattgtttgtggaaatggattaacatacccgtctatgcctaaaagataataaaactgaaatatgtcttcaaaaaaaaaaaaaaaaaaaa

SEQ ID NO: 306 - protein, 583 aa, Homo sapiens
MESKGASSCRLLFCLLISATVFRPGLGWYTVNSAYGDTIIIPCRLDVPQNLMFGKWKYEKPDGSPVFIAFRSSTKKSVQYDDVPEYKDRLNLSENYTLSISNARISDEKRFVCMLVTEDNVFEAPTIVKVFKQPSKPEIVSKALFLETEQLKKLGDCISEDSYPDGNITWYRNGKVLHPLEGAVVIIFKKEMDPVTQLYTMTSTLEYKTTKADIQMPFTCSVTYYGPSGQKTIHSEQAVFDIYYPTEQVTIQVLPPKNAIKEGDNITLKCLGNGNPPPEEFLFYLPGQPEGIRSSNTYTLTDVRRNATGDYKCSLIDKKSMIASTAITVHYLDLSLNPSGEVTRQIGDALPVSCTISASRNATVVWMKDNIRLRSSPSFSSLHYQDAGNYVCETALQEVEGLKKRESLTLIVEGKPQIKMTKKTDPSGLSKTIICHVEGFPKPAIQWTITGSGSVINQTEESPYINGRYYSKIIISPEENVTLTCTAENQLERTVNSLNVSAISIPEHDEADEISDENREKVNDQAKLIVGIVVGLLLAALVAGVVYWLYMKKSKTASKHVNKDLGNMEENKKLEENNHKTEA

SEQ ID NO: 307 - DNA, 2056 bp, Homo sapiens
aaagttacattttctctggaactctcctaggccactccctgctgatgcaacatctgggtttgggcagaaaggagggtgcttcggagcccgccctttctgagcttcctgggccggctctagaacaattcaggcttcgctgcgactcagacctcagctccaacatatgcattctgaagaaagatggctgagatggacagaatgctttattttggaaagaaacaatgttctaggtcaaactgagtctaccaaatgcagactttcacaatggttctagaagaaatctggacaagtcttttcatgtggtttttctacgcattgattccatgtttgctcacagatgaagtggccattctgcctgcccctcagaacctctctgtactctcaaccaacatgaagcatctcttgatgtggagcccagtgatcgcgcctggagaaacagtgtactattctgtcgaataccagggggagtacgagagcctgtacacgagccacatctggatccccagcagctggtgctcactcactgaaggtcctgagtgtgatgtcactgatgacatcacggccactgtgccatacaaccttcgtgtcagggccacattgggctcacagacctcagcctggagcatcctgaagcatccctttaatagaaactcaaccatccttacccgacctgggatggagatcaccaaagatggcttccacctggttattgagctggaggacctggggccccagtttgagttccttgtggcctactggaggagggagcctggtgccgaggaacatgtcaaaatggtgaggagtgggggtattccagtgcacctagaaaccatggagccaggggctgcatactgtgtgaaggcccagacattcgtgaaggccattgggaggtacagcgccttcagccagacagaatgtgtggaggtgcaaggagaggccattcccctggtactggccctgtttgcctttgttggcttcatgctgatccttgtggtcgtgccactgttcgtctggaaaatgggccggctgctccagtactcctgttgccccgtggtggtcctcccagacaccttgaaaataaccaattcaccccagaagttaatcagctgcagaagggaggaggtggatgcctgtgccacggctgtgatgtctcctgaggaactcctcagggcctggatctcataggtttgcggaagggcccaggtgaagccgagaacctggtctgcatgacatggaaaccatgaggggacaagttgtgtttctgttttccgccacggacaagggatgagagaagtaggaagagcctgttgtctacaagtctagaagcaaccatcagaggcagggtggtttgtctaacagaacactgactgaggcttaggggatgtgacctctagactgggggctgccacttgctggctgagcaaccctgggaaaagtgacttcatcccttcggtcctaagttttctcatctgtaatgggggaattacctacacacctgctaaacacacacacacagagtctctctctatatatacacacgtacacataaatacacccagcacttgcaaggctagagggaaactggtgacactctacagtctgactgattcagtgtttctggagagcaggacataaatgtatgatgagaatgatcaaggactctacacactgggtggcttggagagcccactttcccagaataatccttgagagaaaaggaatcatgggagcaatggtgttgagttcacttcaagcccaatgccggtgcagaggggaatggcttagcgagctctacagtaggtgacctggaggaaggtcacagccacactgaaaatgggatgtgcatgaacacggaggatccatgaactactgtaaagtgttgacagtgtgtgcacactgcagacagcaggtgaaatgtatgtgtgcaatgcgacgagaatgcagaagtcagtaacatgtgcatgtttgttgtgctccttttttctgttggtaaagtacagaattcagcaaataaaaagggccaccctggccaaaagcggtaaaaaaaaaaaaaaaa

SEQ ID NO: 308 - protein, 311 aa, Homo sapiens
MQTFTMVLEEIWTSLFMWFFYALIPCLLTDEVAILPAPQNLSVLSTNMKHLLMWSPVIAPGETVYYSVEYQGEYESLYTSHIWIPSSWCSLTEGPECDVTDDITATVPYNLRVRATLGSQTSAWSILKHPFNRNSTILTRPGMEITKDGFHLVIELEDLGPQFEFLVAYWRREPGAEEHVKMVRSGGIPVHLETMEPGAAYCVKAQTFVKAIGRYSAFSQTECVEVQGEAIPLVLALFAFVGFMLILVVVPLFVWKMGRLLQYSCCPVVVLPDTLKITNSPQKLISCRREEVDACATAVMSPEELLRAWIS

SEQ ID NO: 309 - DNA, 2652 bp, Homo sapiens
gacaatgtgcaaatgacaccgttttgtgctcaccagggcaaagcaagggagcgccctcacttcagcatctcagccctgctaaagaaaaagctgctgggtaacatcctttgtttttgcccagggaagctttagctgtgattcccttcagccggctcctgaatgtcaaagccagcacaggccagccagaagatgacactgagactacaggtttggaaggcggcgttgccatgccaggtgccgaagatgatgtggtgactccaggaaccagcgaagaccgctataagtctggcttgacaactctggtggcaacaagtgtcaacagtgtaacaggcattcgcatcgaggatctgccaacttcagaaagcacagtccacgcgcaagaacaaagtccaagcgccacagcctcaaacgtggccaccagtcactccacggagaaagtggatggagacacacagacaacagttgagaaagatggtttgtcaacagtgaccctggttggaatcatagttggggtcttactagccatcggcttcattggtgcaatcatcgttgtggttatgcgaaaaatgtcgggaaggtactcgccctaaagagctgaagggttacgccctgctgccaacgtgcttaaaaaaagaccgtttctgactctgtgccctgtccctgagctcgtgggagaagatgacccgtggaacacttgcctggcccactcagaatccacggtgacctctccgcttgccaaaataaccgaaggaaagaccgttcaccagacttggctcctctaaacatttgctgttcaaacatgtttttgaatatacattctataaaagattatttgaaagacaaaattcatagaaaatggagcaaaactgtataaactgatttgtaactaacactggaccattggatcgatattatatgctgtaaccatgtgtctccgtctgaccattcttgttattgttaaaatgcagaggaatctggaaatatttatatccacggagtccttggatccagtgctacgtcagtaaatagcaccagcattttgcaattgctgatctgctgaaatgtacacattctggtctagtttggtctatcttttaaagcctgatctggtgtgaataatcaactaggaaatctaaacttggataacacgtggtgaacaactgcctttagctggtccagattaatcatttcaaagacatccattttagatcacaagcaggaagtcgatagtctcaaaggcactttgtttctcccaagtaggccaccaggcagcctctagagttgctttacccaaatccttctccagccatgacttggtgactctaagcttgctcccacctgccccctccacttccctcagatgatgaggagccagggctaagggggcagccttctctcttcccagtgatgcacatccttcacattggctgctttgttctggaatatggatatctcagcctggatgccgaggaagctgctggatgcttaatggtgctagaggctcaagtgtgtttgaaaccaagagccagttgtcccccatgcagaaagaaatcctgtgtgagcctctggtatgagaaataaaatctgccagttttataacattcactttctgcctctgaggaaagatacagggaacaaaaatcaatttgtacagtcttaatattaaaagcagcttgactaaatacctgatttaaaaatagaagacatccccagtcctcatgacataccgcaaatatctgtggggtcctgttgaaaagaacaaaataaaggagcccaaggggtcattctgtctcagcaccatccagcctggcacttctcttcccatatatccattggatttttttttttttttcctaaacaaagtttttacactgagcagatgctctgtcatgatggcggttgtgcaattctggtatcctctaaatttgtaagcattcataaaacaggaaaaagtaaactatcattcggaagcacagcccattcctcccattttttgcaatgatgtctggatgttattttaaacagtgtgtctgtgtgttcccaaatccagctggccccaccagctcagattccattttttttgtgtgtgtgtgtgaaacgtagtctgcaactctgcctcccggcaattatacatgtgtcaggatgtcaaaaagcaattctcctgcctcagcctcctgagtagctgggactacaggttcctaccaccacacccggccaatttttgtatttttagtagagatggggtttcaccgtatcggcgaggatgatctctatctcttgacctcgtgatctgcccgcctcggcctcccaaagtgctgggattacaggcgtgtgccactgcgctcggcctcagattccatatttgaacaccagctgattgagagaaggggaatgagaagagctggatgagtttaaataactcattgttcagattcctgaacaggagttgggataatggccatcttttctttcctatcctttcttcccccctcactgtgaaaaataacagtccaccccaagtcatacactggacccagtgcctgcggggacaggactgtgggtttcttggtcacacctgtgttggtgctcaatgcagtgtagacatgttttcaaataaaacaaatgattgtgtacaaaaaaaaaaaaaaaaaa

SEQ ID NO: 310 - protein, 120 aa, Homo sapiens
MPGAEDDVVTPGTSEDRYKSGLTTLVATSVNSVTGIRIEDLPTSESTVHAQEQSPSATASNVATSHSTEKVDGDTQTTVEKDGLSTVTLVGIIVGVLLAIGFIGAIIVVVMRKMSGRYSP

SEQ ID NO: 311 - DNA, 2757 bp, Homo sapiens
gggcaatggcgggcgcccctcccccagcctcgttgccgccttgcagtttgatctcagactgctgtgctagcaatcagcgagactccgtgggcgtaggaccctccgagccaggtgtgggatatagtctcgtggtgcgccgtttcttaagctggtctgaaaagcgcaatattcgggtgggagtgacccgattttccaggtgcttccgtcacccctttctttgactcggaaagggaactccctgaccccttgcgcttcccaggtgaggcaatgcctcgccctgcttcggctcgcgcacggtgcgcgcacacactggcctgcgcccactgtctagcactccctagtgagatgaacccggtacctcagatggaaatgcagaaatcacccgtcttctgcgtcgctcacgctgggagctgtagaccggagctgttcctattcggccatcttggctcctagtatttttaattaagcacttgtgttctgattagtggccaaataaatgacagtcagaacttcagctaaggtacaataaggttttgctgtggcgtggcacctggtctctttctagaaggaaagttcaacatacagcacaattctggacacattgtattggtttgatgctcctacctggaacaggtggagctggtctcttgggcagcctgacatctggtccactcctctgtcctatgccgggatcatcatgaccgtagagattatgtcactgttttgcatccttgttacataactcagttcctggtagattactatgtcagagagtcacaatgaccttgcacaataacagtacaacctcgcctttgtttccaaacatcagctcctcctggatacacagcccctccgatgcagggctgcccccgggaaccgtcactcatttcggcagctacaatgtttctcgagcagctggcaatttctcctctccagacggtaccaccgatgaccctctgggaggtcataccgtctggcaagtggtcttcatcgctttcttaacgggcatcctggccttggtgaccatcatcggcaacatcctggtaattgtgtcatttaaggtcaacaagcagctgaagacggtcaacaactacttcctcttaagcctggcctgtgccgatctgattatcggggtcatttcaatgaatctgtttacgacctacatcatcatgaatcgatgggccttagggaacttggcctgtgacctctggcttgccattgactacgtagccagcaatgcctctgttatgaatcttctggtcatcagctttgacagatacttttccatcacgaggccgctcacgtaccgagccaaacgaacaacaaagagagccggtgtgatgatcggtctggcttgggtcatctcctttgtcctttgggctcctgccatcttgttctggcaatactttgttggaaagagaactgtgcctccgggagagtgcttcattcagttcctcagtgagcccaccattacttttggcacagccatcgctgctttttatatgcctgtcaccattatgactattttatactggaggatctataaggaaactgaaaagcgtaccaaagagcttgctggcctgcaagcctctgggacagaggcagagacagaaaactttgtccaccccacgggcagttctcgaagctgcagcagttacgaacttcaacagcaaagcatgaaacgctccaacaggaggaagtatggccgctgccacttctggttcacaaccaagagctggaaacccagctccgagcagatggaccaagaccacagcagcagtgacagttggaacaacaatgatgctgctgcctccctggagaactccgcctcctccgacgaggaggacattggctccgagacgagagccatctactccatcgtgctcaagcttccgggtcacagcaccatcctcaactccaccaagttaccctcatcggacaacctgcaggtgcctgaggaggagctggggatggtggacttggagaggaaagccgacaagctgcaggcccagaagagcgtggacgatggaggcagttttccaaaaagcttctccaagcttcccatccagctagagtcagccgtggacacagctaagacttctgacgtcaactcctcagtgggtaagagcacggccactctacctctgtccttcaaggaagccactctggccaagaggtttgctctgaagaccagaagtcagatcactaagcggaaaaggatgtccctggtcaaggagaagaaagcggcccagaccctcagtgcgatcttgcttgccttcatcatcacttggaccccatacaacatcatggttctggtgaacaccttttgtgacagctgcatacccaaaaccttttggaatctgggctactggctgtgctacatcaacagcaccgtgaaccccgtgtgctatgctctgtgcaacaaaacattcagaaccactttcaagatgctgctgctgtgccagtgtgacaaaaaaaagaggcgcaagcagcagtaccagcagagacagtcggtcatttttcacaagcgcgcacccgagcaggccttgtagaatgaggttgtatcaatagcagtgacaaaacgcacacatcaacccacagaccttaggaggaggaaggcgagggcggggtgacttctggtgatgataaaaatggttttatcacccagatgtgaaagaagctgcctgtttactgatccattgaataaacccattttaatagaaaaagtcaataccaattcagcaaaaaaaaaaaaaa

SEQ ID NO: 312 - protein, 590 aa, Homo sapiens
MTLHNNSTTSPLFPNISSSWIHSPSDAGLPPGTVTHFGSYNVSRAAGNFSSPDGTTDDPLGGHTVWQVVFIAFLTGILALVTIIGNILVIVSFKVNKQLKTVNNYFLLSLACADLIIGVISMNLFTTYIIMNRWALGNLACDLWLAIDYVASNASVMNLLVISFDRYFSITRPLTYRAKRTTKRAGVMIGLAWVISFVLWAPAILFWQYFVGKRTVPPGECFIQFLSEPTITFGTAIAAFYMPVTIMTILYWRIYKETEKRTKELAGLQASGTEAETENFVHPTGSSRSCSSYELQQQSMKRSNRRKYGRCHFWFTTKSWKPSSEQMDQDHSSSDSWNNNDAAASLENSASSDEEDIGSETRAIYSIVLKLPGHSTILNSTKLPSSDNLQVPEEELGMVDLERKADKLQAQKSVDDGGSFPKSFSKLPIQLESAVDTAKTSDVNSSVGKSTATLPLSFKEATLAKRFALKTRSQITKRKRMSLVKEKKAAQTLSAILLAFIITWTPYNIMVLVNTFCDSCIPKTFWNLGYWLCYINSTVNPVCYALCNKTFRTTFKMLLLCQCDKKKRRKQQYQQRQSVIFHKRAPEQAL

SEQ ID NO: 313 - DNA, 3879 bp, Homo sapiens
atcagacgcgcagaggaggcggggccgcggctggtttcctgccggggggcggctctgggccgccgagtcccctcctcccgcccctgaggaggaggagccgccgccacccgccgcgcccgacacccgggaggccccgccagcccgcgggagaggcccagcgggagtcgcggaacagcaggcccgagcccaccgcgccgggccccggacgccgcgcggaaaagatgaatttacaaccaattttctggattggactgatcagttcagtttgctgtgtgtttgctcaaacagatgaaaatagatgtttaaaagcaaatgccaaatcatgtggagaatgtatacaagcagggccaaattgtgggtggtgcacaaattcaacatttttacaggaaggaatgcctacttctgcacgatgtgatgatttagaagccttaaaaaagaagggttgccctccagatgacatagaaaatcccagaggctccaaagatataaagaaaaataaaaatgtaaccaaccgtagcaaaggaacagcagagaagctcaagccagaggatattactcagatccaaccacagcagttggttttgcgattaagatcaggggagccacagacatttacattaaaattcaagagagctgaagactatcccattgacctctactaccttatggacctgtcttactcaatgaaagacgatttggagaatgtaaaaagtcttggaacagatctgatgaatgaaatgaggaggattacttcggacttcagaattggatttggctcatttgtggaaaagactgtgatgccttacattagcacaacaccagctaagctcaggaacccttgcacaagtgaacagaactgcaccagcccatttagctacaaaaatgtgctcagtcttactaataaaggagaagtatttaatgaacttgttggaaaacagcgcatatctggaaatttggattctccagaaggtggtttcgatgccatcatgcaagttgcagtttgtggatcactgattggctggaggaatgttacacggctgctggtgttttccacagatgccgggtttcactttgctggagatgggaaacttggtggcattgttttaccaaatgatggacaatgtcacctggaaaataatatgtacacaatgagccattattatgattatccttctattgctcaccttgtccagaaactgagtgaaaataatattcagacaatttttgcagttactgaagaatttcagcctgtttacaaggagctgaaaaacttgatccctaagtcagcagtaggaacattatctgcaaattctagcaatgtaattcagttgatcattgatgcatacaattccctttcctcagaagtcattttggaaaacggcaaattgtcagaaggcgtaacaataagttacaaatcttactgcaagaacggggtgaatggaacaggggaaaatggaagaaaatgttccaatatttccattggagatgaggttcaatttgaaattagcataacttcaaataagtgtccaaaaaaggattctgacagctttaaaattaggcctctgggctttacggaggaagtagaggttattcttcagtacatctgtgaatgtgaatgccaaagcgaaggcatccctgaaagtcccaagtgtcatgaaggaaatgggacatttgagtgtggcgcgtgcaggtgcaatgaagggcgtgttggtagacattgtgaatgcagcacagatgaagttaacagtgaagacatggatgcttactgcaggaaagaaaacagttcagaaatctgcagtaacaatggagagtgcgtctgcggacagtgtgtttgtaggaagagggataatacaaatgaaatttattctggcaaattctgcgagtgtgataatttcaactgtgatagatccaatggcttaatttgtggaggaaatggtgtttgcaagtgtcgtgtgtgtgagtgcaaccccaactacactggcagtgcatgtgactgttctttggatactagtacttgtgaagccagcaacggacagatctgcaatggccggggcatctgcgagtgtggtgtctgtaagtgtacagatccgaagtttcaagggcaaacgtgtgagatgtgtcagacctgccttggtgtctgtgctgagcataaagaatgtgttcagtgcagagccttcaataaaggagaaaagaaagacacatgcacacaggaatgttcctattttaacattaccaaggtagaaagtcgggacaaattaccccagccggtccaacctgatcctgtgtcccattgtaaggagaaggatgttgacgactgttggttctattttacgtattcagtgaatgggaacaacgaggtcatggttcatgttgtggagaatccagagtgtcccactggtccagacatcattccaattgtagctggtgtggttgctggaattgttcttattggccttgcattactgctgatatggaagcttttaatgataattcatgacagaagggagtttgctaaatttgaaaaggagaaaatgaatgccaaatgggacacgggtgaaaatcctatttataagagtgccgtaacaactgtggtcaatccgaagtatgagggaaaatgagtactgcccgtgcaaatcccacaacactgaatgcaaagtagcaatttccatagtcacagttaggtagctttagggcaatattgccatggttttactcatgtgcaggttttgaaaatgtacaatatgtataatttttaaaatgttttattattttgaaaataatgttgtaattcatgccagggactgacaaaagacttgagacaggatggttactcttgtcagctaaggtcacattgtgcctttttgaccttttcttcctggactattgaaatcaagcttattggattaagtgatatttctatagcgattgaaagggcaatagttaaagtaatgagcatgatgagagtttctgttaatcatgtattaaaactgatttttagctttacaaatatgtcagtttgcagttatgcagaatccaaagtaaatgtcctgctagctagttaaggattgttttaaatctgttattttgctatttgcctgttagacatgactgatgacatatctgaaagacaagtatgttgagagttgctggtgtaaaatacgtttgaaatagttgatctacaaaggccatgggaaaaattcagagagttaggaaggaaaaaccaatagctttaaaacctgtgtgccattttaagagttacttaatgtttggtaacttttatgccttcactttacaaattcaagccttagataaaagaaccgagcaattttctgctaaaaagtccttgatttagcactatttacatacaggccatactttacaaagtatttgctgaatggggaccttttgagttgaatttattttattatttttattttgtttaatgtctggtgctttctgtcacctcttctaatcttttaatgtatttgtttgcaattttggggtaagactttttttatgagtactttttctttgaagttttagcggtcaatttgcctttttaatgaacatgtgaagttatactgtggctatgcaacagctctcacctacgcgagtcttactttgagttagtgccataacagaccactgtatgtttacttctcaccatttgagttgcccatcttgtttcacactagtcacattcttgttttaagtgcctttagttttaacagttcactttttacagtgctatttactgaagttatttattaaatatgcctaaaatacttaaatcggatgtcttgactctgatgtattttatcaggttgtgtgcatgaaatttttatagattaaagaagttgaggaaaagcaaaaaaaaaa

SEQ ID NO: 314 - protein, 798 aa, Homo sapiens
MNLQPIFWIGLISSVCCVFAQTDENRCLKANAKSCGECIQAGPNCGWCTNSTFLQEGMPTSARCDDLEALKKKGCPPDDIENPRGSKDIKKNKNVTNRSKGTAEKLKPEDITQIQPQQLVLRLRSGEPQTFTLKFKRAEDYPIDLYYLMDLSYSMKDDLENVKSLGTDLMNEMRRITSDFRIGFGSFVEKTVMPYISTTPAKLRNPCTSEQNCTSPFSYKNVLSLTNKGEVFNELVGKQRISGNLDSPEGGFDAIMQVAVCGSLIGWRNVTRLLVFSTDAGFHFAGDGKLGGIVLPNDGQCHLENNMYTMSHYYDYPSIAHLVQKLSENNIQTIFAVTEEFQPVYKELKNLIPKSAVGTLSANSSNVIQLIIDAYNSLSSEVILENGKLSEGVTISYKSYCKNGVNGTGENGRKCSNISIGDEVQFEISITSNKCPKKDSDSFKIRPLGFTEEVEVILQYICECECQSEGIPESPKCHEGNGTFECGACRCNEGRVGRHCECSTDEVNSEDMDAYCRKENSSEICSNNGECVCGQCVCRKRDNTNEIYSGKFCECDNFNCDRSNGLICGGNGVCKCRVCECNPNYTGSACDCSLDTSTCEASNGQICNGRGICECGVCKCTDPKFQGQTCEMCQTCLGVCAEHKECVQCRAFNKGEKKDTCTQECSYFNITKVESRDKLPQPVQPDPVSHCKEKDVDDCWFYFTYSVNGNNEVMVHVVENPECPTGPDIIPIVAGVVAGIVLIGLALLLIWKLLMIIHDRREFAKFEKEKMNAKWDTGENPIYKSAVTTVVNPKYEGK

SEQ ID NO: 315 - DNA, 2967 bp, Homo sapiens
agtttctgagagaagaaccctgaggaacagacgttccctggcggccctggcgccttcaaacccagacatgctgctgctgctgctgctgctgcccctgctctgggggacaaaggggatggagggagacagacaatatggggatggttacttgctgcaagtgcaggagctggtgacggtgcaggagggcctgtgtgtccatgtgccctgctccttctcctacccccaggatggctggactgactctgacccagttcatggctactggttccgggcaggagacagaccataccaagacgctccagtggccacaaacaacccagacagagaagtgcaggcagagacccagggccgattccaactccttggggacatttggagcaacgactgctccctgagcatcagagacgccaggaagagggataaggggtcatatttctttcggctagagagaggaagcatgaaatggagttacaaatcacagttgaattacaaaactaagcagctgtctgtgtttgtgacagccctgacccataggcctgacatcctcatcctagggaccctagagtctggccactccaggaacctgacctgctctgtgccctgggcctgtaagcaggggacaccccccatgatctcctggattggggcctccgtgtcctccccgggccccactactgcccgctcctcagtgctcacccttaccccaaagccccaggaccacggcaccagcctcacctgtcaggtgaccttgcctgggacaggtgtgaccacgaccagtaccgtccgcctcgatgtgtcctaccctccttggaacttgaccatgactgtcttccaaggagatgccacagcatccacagccctgggaaatggctcatctctttcagtccttgagggccagtctctgcgcctggtctgtgctgtcaacagcaatccccctgccaggctgagctggacccgggggagcctgaccctgtgcccctcacggtcctcaaaccctgggctgctggagctgcctcgagtgcacgtgagggatgaaggggaattcacctgccgagctcagaacgctcagggctcccagcacatttccctgagcctctccctgcagaatgagggcacaggcacctcaagacctgtatcacaagtgacactggcagcagtcgggggagctggagccacagccctggccttcctgtccttctgcatcatcttcatcatagtgaggtcctgcaggaagaaatcggcaaggccagcagcgggcgtgggggatacaggcatggaagatgcaaaggccatcaggggctcggcctctcagggacccctgactgaatcctggaaagatggcaaccccctgaagaagcctcccccagctgttgccccctcgtcaggggaggaaggagagctccattatgcaaccctcagcttccataaagtgaagcctcaggacccgcagggacaggaggccactgacagtgaatactcggagatcaagatccacaagcgagaaactgcagagactcaggcctgtttgaggaatcacaacccctccagcaaagaagtcagaggctgattctcatagaacaagaaccctctagagccccatgctatgcagtaggtcaccagggctccctcctcctgtctaaccaaaacttggaccaatgtctcccctttccccggctaccagggacccatccctgcctctagcttctactacccaccattctcctctcgacctctctgaggttgactattttagattccacatagagatgaggtcatgtggtacttgcctctctgtgtgtggctcattttacacaaaaaaatatcccctaggttcatccatgttctctcaaatgacagaatcaagcactgaatatttttttttctttgagagatggagtttcgctctgttgcccaggctggagtgcagtggttcaatctctgctcactgcaacctccacctcctgggttcaaacgattctcctgcctcagcttcccaagtagctggtactacaggcgtgtgtcaccacgcccagctaatttttgtattttttagtagagacggggtttcactataagtgggccaggctagtctcaaactcctgacctcaagtgatctgcctgccttggcctcccaaagtgctgggatttcaggcatgagccaccgcacccagcttgcattgaatattttcaaggagctaaaagaagattttaaatggtctcacaaaaacagataaatatttgcacagatgggtgtgctaatcattgtgccttgatggttccacgatgtatccgggtgtggaaatctcactgggtctctctcaaggccactcggctactcaggacagggctggaatttaaagcctgtccgattctgaggtctcttctctcatctagcactgagtcaagcaatcagcaggctgggcaccccttagccataagttttcaggaaataaattccttgagggcattgacttttacaaaagagggagcagcaatggcctagagtctcaggaacaagacaggtgcactgaggagatgaaggccgggaccccctgcccaacctgtatggcgggtctgtacttattttgtttacccccaatttaaaacgtttttttttattgcaggttgtttgtttgatatggtttggctgtgtccccacccaaatcttatctagaattgtaatcagaattataatccccatgtgttgggggagggacctggtgggaggtgataggatcatgggggtggttcccccatgctgttctgatagtgagtgagttatcacgagatctgatggttttgtaagtggtggtttcccctgctcttctctcttgcctgccaccatgtaagatgtgcctggttccccttccgccatgattgtaagtttcctgaggcctcccccgccatgtggaactgtgagtcaattacacctctttcatttataaattaaaaaaaaaaaaaaaaaaa

SEQ ID NO: 316 - protein, 499 aa, Homo sapiens
MLLLLLLLPLLWGTKGMEGDRQYGDGYLLQVQELVTVQEGLCVHVPCSFSYPQDGWTDSDPVHGYWFRAGDRPYQDAPVATNNPDREVQAETQGRFQLLGDIWSNDCSLSIRDARKRDKGSYFFRLERGSMKWSYKSQLNYKTKQLSVFVTALTHRPDILILGTLESGHSRNLTCSVPWACKQGTPPMISWIGASVSSPGPTTARSSVLTLTPKPQDHGTSLTCQVTLPGTGVTTTSTVRLDVSYPPWNLTMTVFQGDATASTALGNGSSLSVLEGQSLRLVCAVNSNPPARLSWTRGSLTLCPSRSSNPGLLELPRVHVRDEGEFTCRAQNAQGSQHISLSLSLQNEGTGTSRPVSQVTLAAVGGAGATALAFLSFCIIFIIVRSCRKKSARPAAGVGDTGMEDAKAIRGSASQGPLTESWKDGNPLKKPPPAVAPSSGEEGELHYATLSFHKVKPQDPQGQEATDSEYSEIKIHKRETAETQACLRNHNPSSKEVRG

SEQ ID NO: 317 - DNA, 1906 bp, Homo sapiens
ggcgccgccgccgctcccgaggcccctgccgccgccgctcccgctgctgtcgccgcgcagagccggagcaggagccacggccgagaggagggaggaggaggaggaggaggtggaggaggtggaggaggtggaggaggcgccggaccgggggggatagattcccagaagtgggataactggatcagagggtgattaccctgtgtataagagtatgtgtctcactgcaccttcaatggcattgagtagatcgtcagtatttaaacagatcacatcatgcgtgagtacaagctagtggtccttggttcaggaggcgttgggaagtctgctctgacagttcagtttgttcagggaatttttgttgaaaaatatgacccaacgatagaagattcctacagaaagcaagttgaagtcgattgccaacagtgtatgctcgaaatcctggatactgcagggacagagcaatttacagcaatgagggatttgtatatgaagaacggccaaggttttgcactagtatattctattacagctcagtccacgtttaacgacttacaggacctgagggaacagattttacgggttaaggacacggaagatgttccaatgattttggttggcaataaatgtgacctggaagatgagcgagtagttggcaaagagcagggccagaatttagcaagacagtggtgtaactgtgcctttttagaatcttctgcaaagtcaaagatcaatgttaatgagatattttatgacctggtcagacagataaataggaaaacaccagtggaaaagaagaagcctaaaaagaaatcatgtctgctgctctaggcccatagtcagcagcagctctgagccagattacaggaatgaagaactgttgcctaattggaaagtgccagcattccagacttcaaaaataaaaaatctgaagaggcttctcctgttttatatattatgtgaagaatttagatcttatattggtttgcacaagttccctggagaaaaaaattgctctgtgtatatctcttggaaaataagacaatagtatttctcctttgcaatagcagttataacagatgtgaaaatatacttgactctaatatgattatacaaaagagcatggatgcatttcaaatgttagatattgctactataatcaaatgatttcatattgatctttttatcatgatcctccctatcaagcactaaaaagttgaaccattatactttatatctgtaatgatactgattatgaaatgtcccctcaaactcattgcagcagataacttttttgagtcattgacttcattttatatttaaaaaattatggaatatcatctgtcattatattctaattaaaattgtgcataatgctttggaaaaatgggtcttttataggaaaaaaactgggataactgatttctatggctttcaaagctaaaatatataatatactaaaccaactctaatattgcttcttgtgttttactgtcagattaaattacagcttttatggatgattaaattttagtacattttcatttggtttgtgtgtttttgttattgtttatagattaaagcgtttattttataatgaccacattgttttaaatgcgacagtagctcctttctgcctagtatctgcagaacactggctttaaactatactaagtaactggtgatttctctaggaacagacctcgcactttctgttctaaatatatttattcctactatacagtaaaatacatcagacaacatagaatagttttgtatattctctcttgatcttaaagattgtatcttattgaatatcccactgtatattatttttatatgtaaaaagataagtttaatactgtatcagggtttaacttttactatttcagatcttccacagcttgta

SEQ ID NO: 318 - protein, 184 aa, Homo sapiens
MREYKLVVLGSGGVGKSALTVQFVQGIFVEKYDPTIEDSYRKQVEVDCQQCMLEILDTAGTEQFTAMRDLYMKNGQGFALVYSITAQSTFNDLQDLREQILRVKDTEDVPMILVGNKCDLEDERVVGKEQGQNLARQWCNCAFLESSAKSKINVNEIFYDLVRQINRKTPVEKKKPKKKSCLLL

SEQ ID NO: 319 - DNA, 11457 bp, Homo sapiens
cgccgccgccgccgccaccgcgggagccagagctgccgggaggagcggcatccgcgccagactggagcgggagggcggcggagggcagttgctgggaatttttcagccgagagggcgagcgatccggagagagaccccgagagcttgggagcggtagggcgtgcgagcgccgcagccagcggagcaaacctcgaaatagatctggaaagccaggctcccggaggaaatgggactgtgaacgaaccggagagcaagaagggaaggaagcgccgggattgctgatgtcagaggagcccggaaagtcgcgctggaaaaatctgaagacagccggggctctgcttcttcctcaggagagacaccgccggccgcccccacacgccccctcggcgcctccgggtgccccctgagagccggcgacagcgcccagccgggctgctgcggggcgacggaggactgaggggcgcgcggagcggagaccgaggagcgacttcaggaatacagataagtgtctggtggcttgacgtggattttaatgaatttggactccatgtggatttggtcgtctccctgattccgagctgcgggcagggagaggggcctcgcgccgccctcagcagccggcggcggccgaggtagaccgagcggggacggaaggacagaccgacgtcgccgagctggaatcatgtgagggccaaccggggaaggtggagcagatgagcacacacaggagccgtctcctcaccgccgcccctctcagcatggaacagaggcggccctggccccgggccctggaggtggacagccgctctgtggtcctgctctcagtggtctgggtgctgctggcccccccagcagccggcatgcctcagttcagcaccttccactctgagaatcgtgactggaccttcaaccacttgaccgtccaccaagggacgggggccgtctatgtgggggccatcaaccgggtctataagctgacaggcaacctgaccatccaggtggctcataagacagggccagaagaggacaacaagtcttgttacccgcccctcatcgtgcagccctgcagcgaagtgctcaccctcaccaacaatgtcaacaagctgctcatcattgactactctgagaaccgcctgctggcctgtgggagcctctaccagggggtctgcaagctgctgcggctggatgacctcttcatcctggtggagccatcccacaagaaggagcactacctgtccagtgtcaacaagacgggcaccatgtacggggtgattgtgcgctctgagggtgaggatggcaagctcttcatcggcacggctgtggatgggaagcaggattacttcccgaccctgtccagccggaagctgccccgagaccctgagtcctcagccatgctcgactatgagctacacagcgattttgtctcctctctcatcaagatcccttcagacaccctggccctggtctcccactttgacatcttctacatctacggctttgctagtgggggctttgtctactttctcactgtccagcccgagacccctgagggtgtggccatcaactccgctggagacctcttctacacctcacgcatcgtgcggctctgcaaggatgaccccaagttccactcatacgtgtccctgcccttcggctgcacccgggccggggtggaataccgcctcctgcaggctgcttacctggccaagcctggggactcactggcccaggccttcaatatcaccagccaggacgatgtactctttgccatcttctccaaagggcagaagcagtatcaccacccgcccgatgactctgccctgtgtgccttccctatccgggccatcaacttgcagatcaaggagcgcctgcagtcctgctaccagggcgagggcaacctggagctcaactggctgctggggaaggacgtccagtgcaccaaggcgcctgtccccatcgatgataacttctgtggactggacatcaaccagcccctgggaggctcaactccagtggagggcctgaccctgtacaccaccagcagggaccgcatgacctctgtggcctcctacgtttacaacggctacagcgtggtttttgtggggactaagagtggcaagctgaaaaagattcgggccgacggtcccccccatggtggggtccagtacgagatggtctctgtgctcaaggacggaagccccatcctccgggacatggccttctccattgatcagcgctacctgtacgtcatgtctgagagacaggtcaccagggtccccgtggagtcatgtgagcagtatacgacttgtggggagtgcctgagctctggggaccctcactgtggctggtgtgccctgcacaacatgtgctcccgcagggacaaatgccaacaggcctgggaacctaatcgatttgctgccagcatcagccagtgtgtgagccttgcagtgcatcccagcagcatctcagtatctgagcacagccggttgcttagcctggtagtgagtgatgctcctgatctatctgcgggtatcgcctgtgcctttgggaacctgacagaggtggaggggcaggtgtccgggagccaggtcatctgcatctcacctgggcccaaggatgtccctgtcatcccgctggatcaagactggtttgggctggagctacagctgaggtccaaggagacagggaagatatttgtcagcaccgagttcaagttttacaactgcagtgcccaccaactgtgcctgtcctgtgtcaacagcgccttccgctgccattggtgcaagtaccgcaacctctgcactcatgaccccaccacctgctccttccaggagggccggatcaatatttcagaggactgtccccagctggtgcccacagaggagatcttgattccagtcggggaggtaaagccaatcacccttaaggcgcgaaatctgccccagccgcagtccggccagcgaggctatgagtgtgtcctcaacatacaaggagccatccaccgggtccccgctctgcgcttcaacagctccagcgttcagtgtcagaacagctcgtaccagtatgatggcatggacatcagcaatctggccgtggatttcgctgtggtgtggaacggcaatttcatcattgacaaccctcaggacctgaaagtccatctctacaagtgtgcagcccagcgggagagctgcggcctctgcctcaaggccgaccggaagtttgagtgtggctggtgcagcggcgagcgcaggtgcaccctccaccagcactgtaccagcccttccagcccctggctcgactggtccagccacaatgtcaagtgctccaaccctcaaatcaccgagattttgacggtgtctggaccgccggaaggagggacgcgagtgaccatccatggcgtgaacctgggtctggacttctccgagatcgcccaccatgtgcaggtggctggggtgccctgcacgcccctcccaggggaatacatcatcgctgagcagattgtctgtgagatgggccatgccctcgtgggaaccacctccgggccagtacgcctgtgtattggcgagtgtaagccagagttcatgacgaagtcccatcagcagtacaccttcgtgaacccttctgtgctgtcactcaacccaatccgaggtcccgagtcaggaggcactatggtgaccattaccggccattaccttggggctgggagcagcgtggcagtctacctgggcaaccagacctgcgagttctacgggaggtcaatgagtgagatcgtgtgtgtctcacccccatcatccaatggccttggcccggtccctgtttctgtgagtgtcgaccgagcccatgtggatagcaacctgcagtttgagtacatagatgaccctcgggtccagcgcatcgagccagagtggagcattgccagtggccacacacccctgaccatcacaggcttcaacctggatgtcattcaggagccaaggatccgagtcaaattcaatggcaaagaatctgtcaatgtgtgtaaagttgtgaacacaaccaccctcacctgcctggcaccctctctgaccacggactaccgccctggcctggacactgtggaacgcccagatgagtttggatttgtctttaacaatgtccaatccttgctaatttacaacgacaccaagtttatctactaccccaacccgacctttgaactgcttagccctactggagtcttggatcaaaagccaggatcgcccatcattctgaagggcaaaaacctctgccctcctgcctctggaggggccaaactcaactacactgtgctcatcggagagaccccttgtgctgtcaccgtatctgagacccagcttctctgcgagcctcccaacctcaccgggcagcacaaggtcatggttcacgtgggcgggatggtgttctcgcctggctcggtgagtgtcatctcagacagcttgctgaccctgccagccatcgtcagcatcgcggccggcggcagcctcctcctcatcatcgtcatcatcgtcctcattgcctacaagcgcaagtctcgagaaaatgacctcactctcaagcggctgcaaatgcagatggacaatctggagtcccgtgtggccttggagtgcaaggaagcttttgctgagctccagacggatatcaatgagttgaccagtgacctggaccgctcaggaatcccttacctggactatcgtacctacgctatgcgagtcctgttcccgggcatcgaggaccaccccgtcctgcgggagctggaggtacaaggaaacgggcagcagcacgtggagaaggccctgaagctctttgcccagctcatcaacaacaaggtgttcctgctgaccttcatccgcaccctggagctgcagcgcagtttctccatgcgcgaccggggcaacgtggcttcgctcatcatgaccggcctgcagggccgcctggaatatgccactgatgtcctcaagcagctgctctctgacctcatcgataagaacctggagaacaagaaccaccccaagctgctactccggaggacagagtctgtggctgaaaagatgctgaccaattggttcgccttcctcctgcacaagttcctaaaggagtgcgcaggggagccactcttcatgctatactgtgccatcaagcagcagatggagaagggccccattgatgccatcacgggcgaggcccgctactccctgagcgaggacaagctcatccggcagcagatcgagtacaagaccctgatcctgaactgcgtcaaccctgacaacgagaacagtccagagatcccagtgaaggtgttaaactgtgacaccatcacacaggtcaaggagaagattcttgatgccgtgtataagaatgtgccctattcccagcggccgagggcagtggacatggacttggagtggcgccaaggccggatcgcccgggtcgtgctgcaagatgaggacatcaccaccaagattgagggtgactggaagcggctcaacacactgatgcattatcaggtgtcagacaggtcggtggtggctctggtccccaaacagacctcctcctacaacatccctgcctctgccagcatctcccggacgtccatcagcagatacgactcctccttcaggtatacgggcagccccgacagcctgcggtcccgggccccgatgatcaccccagacctggaaagtggggtcaaggtgtggcatctggtgaagaaccatgaccacggtgaccagaaggagggtgaccggggcagcaagatggtgtccgagatctacctgacccggctactggccaccaagggcaccctgcagaagtttgtggacgacttgtttgagaccttgttcagcactgtgcaccggggcagcgctctccccctggccatcaagtacatgtttgatttcctagatgagcaggcagacaggcacagcatccatgacacagatgtgcggcacacctggaaaagcaactgcctccctctgcgcttctgggtgaacgtgattaagaacccccagttcgtgtttgacatccacaagggcagcatcacggacgcctgcctctctgtggtggcccagaccttcatggactcttgttcaacgtcagagcaccggctgggcaaggactccccctccaacaagctgctctatgccaaggacatccccagctacaagagctgggtggagagatactacgcagacatcgccaagctcccagccatcagtgaccaggacatgaatgcctacctcgccgagcagtcccgcctgcacgccgtggagttcaacatgctgagtgccctcaatgagatctactcctatgtcagcaagtatagtgaggagctcatcggggccctagagcaggatgagcaggcacggcggcagcggctggcttataaggtggagcagctcattaatgccatgtccattgagagctgagaggaggagcctcgcattcctgggaagagggacctgtccaagctgtcacactgggagtctcagatggaaggacaagtgatggggatcaggccccagagcttgctgtcccctgagaccccatcctggggagaggggaggactcctctccctacgccagccaagtttcgtcatagccagttccagctgggagagacagtgggcgtcgtccatcctcagtgagaacaccagagaacccggggccgggagaaggtggttcttcaagccgagaggcacgagctggggacagttctgcctctgtgactgctgctttgcatgaaaactcatttgatgtatattggggaaataatgagaactttatttaatttttttaagaaaaagggaaaaaaacagaaataaaacaaaaagccgccctgttaatcccgtccaacttttgtttaattctgatttctgtctcccttccatcttttctcccattcctccttctttatataatgcctatttccaaatgccagagaaagcagagatgctgagagacattggagagaaaatgactgtctccttttccttgaaattaaaaaaaaaaaaaaaaagagaaagaggagaagaagaatgatgagcacaagtatgcaccaaacacttcgcaaaaacagaggccagtaaaacctggaattatcccggcagccagaggagtatggaacttccagaactttgcacaaattgcaaagccatcaagagctcaccctggctgactggaaactgagctttatctaccacacacctgtatattctcatcttttgagaggagatgtgtacctagatagtaccaatgctttttgctactgttttttgttttgttttatttaatcctaaacctcaacaaatgaggagctggtctttgatatgtttcctttcaatttccctaaagttactatgagaagtggggtgaggtgggcctctcccagaccagacacctggcagccctgcctcatatcaatccctgtcataaaccaggcaccctggggaaacggcctggaggtgtgtgggccaggcctccacgaggttccatttgaaagttgatttggagacataggtgtttgactttggagttcactccaatcatccagtggtccctggcaattaaaaagaaaacaaaaatcaaacactgtttacagcaagcaatacttgaagagcataggttacagaagctgcagtatttattattatgctttctttctttcattctctcgtgcctggagaggggagaccacccttcgctcatatacggaagctcctgaccatctgggcctacagcacttcctcagtagaaatgactgtggcatgcccacgttactaccttctgcctctctttctgcctctcacggacttgtgagtgtgaaggacaagtggatgacttctcactggactttccttctctgtctcttctgatgatgcctaaaactatggataaccaattctcctgagtgtagattccaaacaaagagaccaaagctccatgcccaggtccaaaggccccatagaagccagtgggagtcatcgagaggaaaggcgctctgtgagtgtcaggaccttggtggccaggatagccatcagagtgtccaggcctcccacattaccttggatccgagcagccagctccaactgttctgcaagcagcactggagtcagggggtaggaggacaagtggaagcaaaggtgtgggactggggaagacaaagaggaacaagctgcccttcctcacttttcaaagggtcaggaatcctaggctatgatgctgggaagctagaccagctcctccaagagagactagaccagggtcattttctctgttattaactctgggctccagcttctccgtgccctgctttacctccaagtggttccaatttccaaaggccctgctgaccacatgtgattcccaggagagggctgggggaggggagcgcagaggtctggcttccatccttggcgtgtagctttggatcgctgtctaaccacacagcagacgttgcccggtctccccagctctagtttcttgcctgaatgcggctgacaaatgggaagagaaaagcattcagcaaaatactcaggaaacttgctgttttcattataattcacaaccagccatgccaaggccactttcttttgaaaatccacttctttaaagtttctcaggccctattagtagcctgaaggaaatactaatgactggccttccgcactaagccaaagtgtttgctcttcatagcactcaaagcttatcagcgcagagcccataatttatggagataaaaggaaaggagatataggtaagaagagtgtgaccaggagaccttatgctacctgtaaaaaagttcagcccaccccatctaacttctgagctctgtttgggtgaagattttctggccgcatggctgctcagactggcatccaggctttgctccaccaagaagttaaaggcagtcggacatctcagtagcatctctaccagcccttaactcaatgcatctacctggcatctcccagcagttacttttggagacgattcactgcccctggggcgtttccttgaaggtttgtggagagcgtggagaatgatggggcaatggccaattggagggtggagagtgaagagccggagctggctgtgagtggtttggccacatttctcaggattccatgagagacttggggaacttgggctgacaaaggaagtagcctggggcatccttaaggaaggaattaagaaaagggaaaaagctggactcaagccacgccatgagggtgaaaggttataaggccctgccccctttccagctgcccacctgttcctcctccacacctcttcgctttgggccaccaagaaccaatgaagtccacaccctttggatgagaaaaagagggagttggttggcctctcttctccctgttatccaatttgaggatattttgaccttgggtaaggatgaagtgttaaagccacagctcctctccacaagaagccattcatcttgggggaggcagagagggaagtctctctccaaagtctatccagcttcgcttcgtttcattgatctgcacaagagacaatgctctggaaaaggaagaggaccccagaagggtgcttggcaagacagaggatgctaatgggcaatggagagcactccctccagctggcccctgctgctgcctcccgtcctctgcatggggtcaggtgcttctgtgcttgctgtcctacctctctccacagcagggctctcaaaaccattttgatcccccattggcagagggttcccctctttacagagttcagtcattaaaagcatggatcagctgttaatctcattggaggagggaactgtttcctgcattcattcatctgggaaccttcttgagtagccactgtctgccagccactgctctagagatgggaaaacagcacggaacaaaaccaaggtctttcttccagcgaatttatatccttcaggaagctggttcctgccaccaacttagcaggcaacagttctcctcccctagtggcacagggtaccagttttgtaggaaaagtggtccagcaaaggaagaaagcagaccaacccagctgccttaccttattctggggccattcccccagcgatgagagctgctcttgtttctactgccaccatctcttctggctgcacttcacctgctgcttgagcttctgaccttccttcagttccaccaaatgaggacaggaaatagcagtcaagacccctggccctgctgagcgtgaaacagaagcaatggatgagtgctggacgaagaatggcctgggcagaacaaatagggagcatttgaaagcttctggctgataaatctccaggtgcatcccggttgccacgcctgcccccattaacctgctcctggtaaatactgatccagcagctgctccaggagaggccgtctttttttcccagccacgctgtgtcttgcatgagactcctggggcctgggcacagagagaaaagaattgagactcaggaggctcagtgggtgagaaaatgcaaagtggcttcacagacacagggctgtgggagcagatcgacggggaacttgggagatgaacttcagggccttccgacgccttgtctcaggaacatgctttgagaaaaatggtagcatcctttccataactcagtctctcttccctagtttccctgaagtgtgacgttttagtatctggagctcagtgatccccatgaatgagggataaagtttcactcttggtattttctaactagtgctagggaaagtcctgagacacgatcacagccactgcttggcatacagggcctccacccaataagcaaactggagattcctcagcctctcgtggacacccacatctcattcttctcacagcagagaagctctcccttcagcctgagctgtcttctttctgctgcagtgcagcctgctccctcctaccctggcctcaaggaaggtaggaaacatcttctgcatttcaaagtcctcactttgacttatttggccttcatcttggcatggaaggtggcaggcagaatggaaatactccccccaaacagaacagatattcttgcgtgtgtaagggcagaagggacaagctctctatcccatgagactaggggccggagcccacctgcctttccccacaacttttcctgctcaaacccactcctcttgacacactggaatctgtattatatatatttttaagaaaatacaatgatggttgtctggttttgttgtttttacaggtgttgtggaataaaaactgtaagaaaattaagtatttaaaatgttccaataaagtggggttttttgttattctaatatattattgtgtacctattgtaaatatgaaacactcctattttgcaagctgaggacacaatttgtactgttgttatatataaataaagtttactgaattaaaaaaaccttaaatctttaaataaaaaaaaaaaaaaaa

SEQ ID NO: 320 - protein, 1894 aa, Homo sapiens
MEQRRPWPRALEVDSRSVVLLSVVWVLLAPPAAGMPQFSTFHSENRDWTFNHLTVHQGTGAVYVGAINRVYKLTGNLTIQVAHKTGPEEDNKSCYPPLIVQPCSEVLTLTNNVNKLLIIDYSENRLLACGSLYQGVCKLLRLDDLFILVEPSHKKEHYLSSVNKTGTMYGVIVRSEGEDGKLFIGTAVDGKQDYFPTLSSRKLPRDPESSAMLDYELHSDFVSSLIKIPSDTLALVSHFDIFYIYGFASGGFVYFLTVQPETPEGVAINSAGDLFYTSRIVRLCKDDPKFHSYVSLPFGCTRAGVEYRLLQAAYLAKPGDSLAQAFNITSQDDVLFAIFSKGQKQYHHPPDDSALCAFPIRAINLQIKERLQSCYQGEGNLELNWLLGKDVQCTKAPVPIDDNFCGLDINQPLGGSTPVEGLTLYTTSRDRMTSVASYVYNGYSVVFVGTKSGKLKKIRADGPPHGGVQYEMVSVLKDGSPILRDMAFSIDQRYLYVMSERQVTRVPVESCEQYTTCGECLSSGDPHCGWCALHNMCSRRDKCQQAWEPNRFAASISQCVSLAVHPSSISVSEHSRLLSLVVSDAPDLSAGIACAFGNLTEVEGQVSGSQVICISPGPKDVPVIPLDQDWFGLELQLRSKETGKIFVSTEFKFYNCSAHQLCLSCVNSAFRCHWCKYRNLCTHDPTTCSFQEGRINISEDCPQLVPTEEILIPVGEVKPITLKARNLPQPQSGQRGYECVLNIQGAIHRVPALRFNSSSVQCQNSSYQYDGMDISNLAVDFAVVWNGNFIIDNPQDLKVHLYKCAAQRESCGLCLKADRKFECGWCSGERRCTLHQHCTSPSSPWLDWSSHNVKCSNPQITEILTVSGPPEGGTRVTIHGVNLGLDFSEIAHHVQVAGVPCTPLPGEYIIAEQIVCEMGHALVGTTSGPVRLCIGECKPEFMTKSHQQYTFVNPSVLSLNPIRGPESGGTMVTITGHYLGAGSSVAVYLGNQTCEFYGRSMSEIVCVSPPSSNGLGPVPVSVSVDRAHVDSNLQFEYIDDPRVQRIEPEWSIASGHTPLTITGFNLDVIQEPRIRVKFNGKESVNVCKVVNTTTLTCLAPSLTTDYRPGLDTVERPDEFGFVFNNVQSLLIYNDTKFIYYPNPTFELLSPTGVLDQKPGSPIILKGKNLCPPASGGAKLNYTVLIGETPCAVTVSETQLLCEPPNLTGQHKVMVHVGGMVFSPGSVSVISDSLLTLPAIVSIAAGGSLLLIIVIIVLIAYKRKSRENDLTLKRLQMQMDNLESRVALECKEAFAELQTDINELTSDLDRSGIPYLDYRTYAMRVLFPGIEDHPVLRELEVQGNGQQHVEKALKLFAQLINNKVFLLTFIRTLELQRSFSMRDRGNVASLIMTGLQGRLEYATDVLKQLLSDLIDKNLENKNHPKLLLRRTESVAEKMLTNWFAFLLHKFLKECAGEPLFMLYCAIKQQMEKGPIDAITGEARYSLSEDKLIRQQIEYKTLILNCVNPDNENSPEIPVKVLNCDTITQVKEKILDAVYKNVPYSQRPRAVDMDLEWRQGRIARVVLQDEDITTKIEGDWKRLNTLMHYQVSDRSVVALVPKQTSSYNIPASASISRTSISRYDSSFRYTGSPDSLRSRAPMITPDLESGVKVWHLVKNHDHGDQKEGDRGSKMVSEIYLTRLLATKGTLQKFVDDLFETLFSTVHRGSALPLAIKYMFDFLDEQADRHSIHDTDVRHTWKSNCLPLRFWVNVIKNPQFVFDIHKGSITDACLSVVAQTFMDSCSTSEHRLGKDSPSNKLLYAKDIPSYKSWVERYYADIAKLPAISDQDMNAYLAEQSRLHAVEFNMLSALNEIYSYVSKYSEELIGALEQDEQARRQRLAYKVEQLINAMSIES

SEQ ID NO: 321 - DNA, 1302 bp, Homo sapiens
agctggggcgcggccgcctgtctgcacagacagcaccatgtcgctcatggtcgtcagcatggtgtgtgttgggttcttcttgctgcagggggcctggccacatgagggagtccacagaaaaccttccctcctggcccacccaggtcccctggtgaaatcagaagagacagtcatcctgcaatgttggtcagatgtcaggtttcagcacttccttctgcacagagaagggaagtttaaggacactttgcacctcattggagagcaccatgatggggtctccaaggccaacttctccatcggtcccatgatgcaagaccttgcagggacctacagatgctacggttctgttactcactccccctatcagttgtcagctccgagtgacccactgcttgtttctgtcacaggaaacccttcaaatagttggccttcacccactgaaccaagctccgaaaccggtaaccccagacacctgcatgttctgattgggacctcagtggtcatcatcctcttcatcctcctcctcttctttctccttcatcgctggtgctgcaacaaaaaaaatgctgttgtaatggaccaagagcctgcagggaacagaacagtgaacagggaggactctgatgaacaagaccctcaggaggtgacatatgcacagttgaatcactgcgttttcacacagagaaaaatcactcgcccttctcagaggcccaagacacccccaacagatatcatcgtgtacacggaacttccaaatgctgagccctgatccaaagttgtctcctgcccatgagcaccacagtcaggccttgaggggatcttctagggagacaacagccctgtctcaaaactgggttgccagctccaatgtaccagcagctggaatctgaaggcgtgagtctgcatcttagggcatcgctcttcctcacaccacaaatctgaacgtgcctctcccttgcttacaaatgtctaaggtccccactgcctgctggagagaaaacacactcctttgcttagcccacaattctccatttcacttgacccctgcccacctctccaacctaactggcttacttcctagtctacttgaggctgcaatcacactgaggaactcacaattccaaacatacaagaggctccctcttaacacggcacttagacacgtgctgttccaccttccctcatgctgttccacctcccctcagactagctttcagccttctgtcagcagtaaaacttatatattttttaaaataatttcaatgtagttttccctccttcaaataaacatgtctgccctca

SEQ ID NO: 322 - protein, 243 aa, Homo sapiens
MSLMVVSMVCVGFFLLQGAWPHEGVHRKPSLLAHPGPLVKSEETVILQCWSDVRFQHFLLHREGKFKDTLHLIGEHHDGVSKANFSIGPMMQDLAGTYRCYGSVTHSPYQLSAPSDPLLVSVTGNPSNSWPSPTEPSSETGNPRHLHVLIGTSVVIILFILLLFFLLHRWCCNKKNAVVMDQEPAGNRTVNREDSDEQDPQEVTYAQLNHCVFTQRKITRPSQRPKTPPTDIIVYTELPNAEP

SEQ ID NO: 323 - DNA, 1593 bp, Homo sapiens
actttcaattctagatcaggaactgaggacatatctaaattttctagttttatagaaggcttttatccacaagaatcaagatcttccctctctgagcaggaatcctttgtgcattgaagactttagattcctctctgcggtagacgtgcacttataagtatttgatggggtggattcgtggtcggaggtctcgacacagctgggagatgagtgaatttcataattataacttggatctgaagaagagtgatttttcaacacgatggcaaaagcaaagatgtccagtagtcaaaagcaaatgtagagaaaatgcatctccattttttttctgctgcttcatcgctgtagccatgggaatccgtttcattattatggtaacaatatggagtgctgtattcctaaactcattattcaaccaagaagttcaaattcccttgaccgaaagttactgtggcccatgtcctaaaaactggatatgttacaaaaataactgctaccaattttttgatgagagtaaaaactggtatgagagccaggcttcttgtatgtctcaaaatgccagccttctgaaagtatacagcaaagaggaccaggatttacttaaactggtgaagtcatatcattggatgggactagtacacattccaacaaatggatcttggcagtgggaagatggctccattctctcacccaacctactaacaataattgaaatgcagaagggagactgtgcactctatgcctcgagctttaaaggctatatagaaaactgttcaactccaaatacgtacatctgcatgcaaaggactgtgtaaagatgatcaaccatctcaataaaagccaggaacagagaagagattacaccagcggtaacactgccaactgagactaaaggaaacaaacaaaaacaggacaaaatgaccaaagactgtcagatttcttagactccacaggaccaaaccatagaacaatttcactgcaaacatgcatgattctccaagacaaaagaagagagatcctaaaggcaattcagatatccccaaggctgcctctcccaccacaagcccagagtggatgggctgggggaggggtgctgttttaatttctaaaggtaggaccaacacccaggggatcagtgaaggaagagaaggccagcagatcactgagagtgcaaccccaccctccacaggaaattgcctcatgggcagggccacagcagagagacacagcatgggcagtgccttccctgcctgtgggggtcatgctgccacttttaatgggtcctccacccaacggggtcagggaggtggtgctgccccagtgggccatgattatcttaaaggcattattctccagccttaagtaagatcttaggacgtttcctttgctatgatttgtacttgcttgagtcccatgactgtttctcttcctctctttcttccttttggaatagtaatatccatcctatgtttgtcccactattgtattttggaagcacataacttgtttggtttcacaggttcacagttaagaaggaattttgcctctgaataaatagaatcttgagtctcatgcaaaaaaaaaaaaaaaaaa

SEQ ID NO: 324 - protein, 216 aa, Homo sapiens
MGWIRGRRSRHSWEMSEFHNYNLDLKKSDFSTRWQKQRCPVVKSKCRENASPFFFCCFIAVAMGIRFIIMVTIWSAVFLNSLFNQEVQIPLTESYCGPCPKNWICYKNNCYQFFDESKNWYESQASCMSQNASLLKVYSKEDQDLLKLVKSYHWMGLVHIPTNGSWQWEDGSILSPNLLTIIEMQKGDCALYASSFKGYIENCSTPNTYICMQRTV

SEQ ID NO: 325 - DNA, 3108 bp, Homo sapiens
gaaatactcgtctctggtaaagtctgagcaggacagggtggctgactggcagatccagaggttcccttggcagtccacgccaggccttcaccatggatcagttccctgaatcagtgacagaaaactttgagtacgatgatttggctgaggcctgttatattggggacatcgtggtctttgggactgtgttcctgtccatattctactccgtcatctttgccattggcctggtgggaaatttgttggtagtgtttgccctcaccaacagcaagaagcccaagagtgtcaccgacatttacctcctgaacctggccttgtctgatctgctgtttgtagccactttgcccttctggactcactatttgataaatgaaaagggcctccacaatgccatgtgcaaattcactaccgccttcttcttcatcggcttttttggaagcatattcttcatcaccgtcatcagcattgataggtacctggccatcgtcctggccgccaactccatgaacaaccggaccgtgcagcatggcgtcaccatcagcctaggcgtctgggcagcagccattttggtggcagcaccccagttcatgttcacaaagcagaaagaaaatgaatgccttggtgactaccccgaggtcctccaggaaatctggcccgtgctccgcaatgtggaaacaaattttcttggcttcctactccccctgctcattatgagttattgctacttcagaatcatccagacgctgttttcctgcaagaaccacaagaaagccaaagccattaaactgatccttctggtggtcatcgtgtttttcctcttctggacaccctacaacgttatgattttcctggagacgcttaagctctatgacttctttcccagttgtgacatgaggaaggatctgaggctggccctcagtgtgactgagacggttgcatttagccattgttgcctgaatcctctcatctatgcatttgctggggagaagttcagaagatacctttaccacctgtatgggaaatgcctggctgtcctgtgtgggcgctcagtccacgttgatttctcctcatctgaatcacaaaggagcaggcatggaagtgttctgagcagcaattttacttaccacacgagtgatggagatgcattgctccttctctgaagggaatcccaaagccttgtgtctacagagaacctggagttcctgaacctgatgctgactagtgaggaaagatttttgttgttatttcttacaggcacaaaatgatggacccaatgcacacaaaacaaccctagagtgttgttgagaattgtgctcaaaatttgaagaatgaacaaattgaactctttgaatgacaaagagtagacatttctcttactgcaaatgtcatcagaactttttggtttgcagatgacaaaaattcaactcagactagtttagttaaatgagggtggtgaatattgttcatattgtggcacaagcaaaagggtgtctgagccctcaaagtgaggggaaaccagggcctgagccaagctagaattccctctctctgactctcaaatcttttagtcattatagatcccccagactttacatgacacagctttatcaccagagagggactgacacccatgtttctctggccccaagggcaaaattcccagggaagtgctctgataggccaagtttgtatcaggtgcccatccctggaaggtgctgttatccatggggaagggatatataagatggaagcttccagtccaatctcatggagaagcagaaatacatatttccaagaagttggatgggtgggtactattctgattacacaaaacaaatgccacacatcacccttaccatgtgcctgatccagcctctcccctgattacaccagcctcgtcttcattaagccctcttccatcatgtccccaaacctgcaagggctccccactgcctactgcatcgagtcaaaactcaaatgcttggcttctcatacgtccaccatggggtcctaccaatagattccccattgcctcctccttcccaaaggactccacccatcctatcagcctgtctcttccatatgacctcatgcatctccacctgctcccaggccagtaagggaaatagaaaaaccctgcccccaaataagaagggatggattccaaccccaactccagtagcttgggacaaatcaagcttcagtttcctggtctgtagaagagggataaggtacctttcacatagagatcatcctttccagcatgaggaactagccaccaactcttgcaggtctcaacccttttgtctgcctcttagacttctgctttccacacctggcactgctgtgctgtgcccaagttgtggtgctgacaaagcttggaagagcctgcaggtgctgctgcgtggcatagcccagacacagaagaggctggttcttacgatggcacccagtgagcactcccaagtctacagagtgatagccttccgtaacccaactctcctggactgccttgaatatcccctcccagtcaccttgtggcaagcccctgcccatctgggaaaataccccatcattcatgctactgccaacctggggagccagggctatgggagcagcttttttttcccccctagaaacgtttggaacaatctaaaagtttaaagctcgaaaacaattgtaataatgctaaagaaaaagtcatccaatctaaccacatcaatattgtcattcctgtattcacccgtccagaccttgttcacactctcacatgtttagagttgcaatcgtaatgtacagatggttttataatctgatttgttttcctcttaacgttagaccacaaatagtgctcgctttctatgtagtttggtaattatcattttagaagactctaccagactgtgtattcattgaagtcagatgtggtaactgttaaattgctgtgtatctgatagctctttggcagtctatatgtttgtataatgaatgagagaataagtcatgttccttcaagatcatgtaccccaatttacttgccattactcaattgataaacatttaacttgtttccaatgtttagcaaatacatattttatagaacttcca

SEQ ID NO: 326 - protein, 355 aa, Homo sapiens
MDQFPESVTENFEYDDLAEACYIGDIVVFGTVFLSIFYSVIFAIGLVGNLLVVFALTNSKKPKSVTDIYLLNLALSDLLFVATLPFWTHYLINEKGLHNAMCKFTTAFFFIGFFGSIFFITVISIDRYLAIVLAANSMNNRTVQHGVTISLGVWAAAILVAAPQFMFTKQKENECLGDYPEVLQEIWPVLRNVETNFLGFLLPLLIMSYCYFRIIQTLFSCKNHKKAKAIKLILLVVIVFFLFWTPYNVMIFLETLKLYDFFPSCDMRKDLRLALSVTETVAFSHCCLNPLIYAFAGEKFRRYLYHLYGKCLAVLCGRSVHVDFSSSESQRSRHGSVLSSNFTYHTSDGDALLLL

SEQ ID NO: 327 - DNA, 1258 bp, Homo sapiens
caccattaggcaaagatagtttctctagagagaatcatgcctgctaattacacgtgtaccaggccagatggagacaatacagattttcgatactttatttatgcagtgacatacactgtcattcttgtgccaggtctcatagggaatatattagccctgtgggtattctatggttatatgaaagaaacaaaacgagctgtgatatttatgataaacttagccattgctgacttactacaagttctttccttgccactgaggatcttctactacttgaatcatgactggccatttgggcctggtctctgcatgttctgtttctacctgaagtatgtcaacatgtatgcaagcatctacttcttggtctgcatcagtgtgcgacgattttggtttctcatgtacccctttcgcttccatgactgcaaacagaaatatgacctgtacatcagcattgctggctggctgatcatctgccttgcctgtgtactctttccactcctcagaaccagtgatgatacctctggcaataggaccaaatgctttgtggatcttcctaccaggaatgtcaacctggcccagtccgttgttatgatgaccattggcgagttgattgggtttgtaactccgcttctgattgtcctatattgtacctggaagacggttttatcactgcaagataaatatcccatggcccaagatcttggagagaaacagaaagccttgaagatgattctaacctgtgcaggggtattcctaatttgctttgcaccttatcatttcagttttcctttagatttcctggtgaagtccaatgaaattaaaagctgcctagccagaagggtgattctaatatttcattctgtggcattgtgtcttgctagtctgaattcatgtcttgacccagtcatatactacttttccactaatgagttccgaagacggctttcaagacaagatttgcatgacagcatccaactccatgcaaaatcctttgtgagtaaccatacagcttccaccatgacacctgaattatgctaaaacaaaaaaccaaactgaatgtgacctgaaatgcaagtacatcagaacatatctgcaatacccaagccacagggaagaacttgcaaaacaacacagcttttcagttctgctctatcttactgctatggggaattcacttcttcaaagcaggacctatttggagcattacgatccacgattattgatgttgacatgtccatgtagtaatttttcttcaagt

SEQ ID NO: 328 - protein, 333 aa, Homo sapiens
MPANYTCTRPDGDNTDFRYFIYAVTYTVILVPGLIGNILALWVFYGYMKETKRAVIFMINLAIADLLQVLSLPLRIFYYLNHDWPFGPGLCMFCFYLKYVNMYASIYFLVCISVRRFWFLMYPFRFHDCKQKYDLYISIAGWLIICLACVLFPLLRTSDDTSGNRTKCFVDLPTRNVNLAQSVVMMTIGELIGFVTPLLIVLYCTWKTVLSLQDKYPMAQDLGEKQKALKMILTCAGVFLICFAPYHFSFPLDFLVKSNEIKSCLARRVILIFHSVALCLASLNSCLDPVIYYFSTNEFRRRLSRQDLHDSIQLHAKSFVSNHTASTMTPELC

SEQ ID NO: 329 - DNA, 3927 bp, Homo sapiens
gcggcggcaggcctagcagcacgggaaccgtcccccgcgcgcatgcgcgcgcccctgaagcgcctgggggacgggtatgggcgggaggtaggggcgcggctccgcgtgccagttgggtgcccgcgcgtcacgtggtgaggaaggaggcggaggtctgagtttcgaaggagggggggagagaagagggaacgagcaagggaaggaaagcggggaaaggaggaaggaaacgaacgagggggagggaggtccctgttttggaggagctaggagcgttgccggcccctgaagtggagcgagagggaggtgcttcgccgtttctcctgccaggggaggtcccggcttcccgtggaggctccggaccaagccccttcagcttctccctccggatcgatgtgctgctgttaacccgtgaggaggcggcggcggcggcagcggcagcggaagatggtgttgctgagagtgttaattctgctcctctcctgggcggcggggatgggaggtcagtatgggaatcctttaaataaatatatcagacattatgaaggattatcttacaatgtggattcattacaccaaaaacaccagcgtgccaaaagagcagtctcacatgaagaccaatttttacgtctagatttccatgcccatggaagacatttcaacctacgaatgaagagggacacttcccttttcagtgatgaatttaaagtagaaacatcaaataaagtacttgattatgatacctctcatatttacactggacatatttatggtgaagaaggaagttttagccatgggtctgttattgatggaagatttgaaggattcatccagactcgtggtggcacattttatgttgagccagcagagagatatattaaagaccgaactctgccatttcactctgtcatttatcatgaagatgatattaactatccccataaatacggtcctcaggggggctgtgcagatcattcagtatttgaaagaatgaggaaataccagatgactggtgtagaggaagtaacacagatacctcaagaagaacatgctgctaatggtccagaacttctgaggaaaaaacgtacaacttcagctgaaaaaaatacttgtcagctttatattcagactgatcatttgttctttaaatattacggaacacgagaagctgtgattgcccagatatccagtcatgttaaagcgattgatacaatttaccagaccacagacttctccggaatccgtaacatcagtttcatggtgaaacgcataagaatcaatacaactgctgatgagaaggaccctacaaatcctttccgtttcccaaatattggtgtggagaagtttctggaattgaattctgagcagaatcatgatgactactgtttggcctatgtcttcacagaccgagattttgatgatggcgtacttggtctggcttgggttggagcaccttcaggaagctctggaggaatatgtgaaaaaagtaaactctattcagatggtaagaagaagtccttaaacactggaattattactgttcagaactatgggtctcatgtacctcccaaagtctctcacattacttttgctcacgaagttggacataactttggatccccacatgattctggaacagagtgcacaccaggagaatctaagaatttgggtcaaaaagaaaatggcaattacatcatgtatgcaagagcaacatctggggacaaacttaacaacaataaattctcactctgtagtattagaaatataagccaagttcttgagaagaagagaaacaactgttttgttgaatctggccaacctatttgtggaaatggaatggtagaacaaggtgaagaatgtgattgtggctatagtgaccagtgtaaagatgaatgctgcttcgatgcaaatcaaccagagggaagaaaatgcaaactgaaacctgggaaacagtgcagtccaagtcaaggtccttgttgtacagcacagtgtgcattcaagtcaaagtctgagaagtgtcgggatgattcagactgtgcaagggaaggaatatgtaatggcttcacagctctctgcccagcatctgaccctaaaccaaacttcacagactgtaataggcatacacaagtgtgcattaatgggcaatgtgcaggttctatctgtgagaaatatggcttagaggagtgtacgtgtgccagttctgatggcaaagatgataaagaattatgccatgtatgctgtatgaagaaaatggacccatcaacttgtgccagtacagggtctgtgcagtggagtaggcacttcagtggtcgaaccatcaccctgcaacctggatccccttgcaacgattttagaggttactgtgatgttttcatgcggtgcagattagtagatgctgatggtcctctagctaggcttaaaaaagcaatttttagtccagagctctatgaaaacattgctgaatggattgtggctcattggtgggcagtattacttatgggaattgctctgatcatgctaatggctggatttattaagatatgcagtgttcatactccaagtagtaatccaaagttgcctcctcctaaaccacttccaggcactttaaagaggaggagacctccacagcccattcagcaaccccagcgtcagcggccccgagagagttatcaaatgggacacatgagacgctaactgcagcttttgccttggttcttcctagtgcctacaatgggaaaacttcactccaaagagaaacctattaagtcatcatctccaaactaaaccctcacaagtaacagttgaagaaaaaatggcaagagatcatatcctcagaccaggtggaattacttaaattttaaagcctgaaaattccaatttgggggtgggaggtggaaaaggaacccaattttcttatgaacagatatttttaacttaatggcacaaagtcttagaatattattatgtgccccgtgttccctgttcttcgttgctgcattttcttcacttgcaggcaaacttggctctcaataaacttttaccacaaattgaaataaatatatttttttcaactgccaatcaaggctaggaggctcgaccacctcaacattggagacatcacttgccaatgtacataccttgttatatgcagacatgtatttcttacgtacactgtacttctgtgtgcaattgtaaacagaaattgcaatatggatgtttctttgtattataaaatttttccgctcttaattaaaaattactgtttaattgacatactcaggataacagagaatggtggtattcagtggtccaggattctgtaatgctttacacaggcagttttgaaatgaaaatcaatttacctttctgttacgatggagttggttttgatactcattttttctttatcacatggctgctacgggcacaagtgactatactgaagaacacagttaagtgttgtgcaaactggacatagcagcacatactacttcagagttcatgatgtagatgtctggtttctgcttacgtcttttaaactttctaattcaattccatttttcaattaataggtgaaattttattcatgctttgatagaaattatgtcaatgaaatgattctttttatttgtagcctacttatttgtgtttttcatatatctgaaatatgctaattatgttttctgtctgatatggaaaagaaaagctgtgtctttatcaaaatatttaaacggttttttcagcatatcatcactgatcattggtaaccactaaagatgagtaatttgcttaagtagtagttaaaattgtagataggccttctgacattttttttcctaaaatttttaacagcattgaaggtgaaacagcacaatgtcccattccaaatttatttttgaaacagatgtaaataattggcattttaaagag

SEQ ID NO: 330 - protein, 748 aa, Homo sapiens
MVLLRVLILLLSWAAGMGGQYGNPLNKYIRHYEGLSYNVDSLHQKHQRAKRAVSHEDQFLRLDFHAHGRHFNLRMKRDTSLFSDEFKVETSNKVLDYDTSHIYTGHIYGEEGSFSHGSVIDGRFEGFIQTRGGTFYVEPAERYIKDRTLPFHSVIYHEDDINYPHKYGPQGGCADHSVFERMRKYQMTGVEEVTQIPQEEHAANGPELLRKKRTTSAEKNTCQLYIQTDHLFFKYYGTREAVIAQISSHVKAIDTIYQTTDFSGIRNISFMVKRIRINTTADEKDPTNPFRFPNIGVEKFLELNSEQNHDDYCLAYVFTDRDFDDGVLGLAWVGAPSGSSGGICEKSKLYSDGKKKSLNTGIITVQNYGSHVPPKVSHITFAHEVGHNFGSPHDSGTECTPGESKNLGQKENGNYIMYARATSGDKLNNNKFSLCSIRNISQVLEKKRNNCFVESGQPICGNGMVEQGEECDCGYSDQCKDECCFDANQPEGRKCKLKPGKQCSPSQGPCCTAQCAFKSKSEKCRDDSDCAREGICNGFTALCPASDPKPNFTDCNRHTQVCINGQCAGSICEKYGLEECTCASSDGKDDKELCHVCCMKKMDPSTCASTGSVQWSRHFSGRTITLQPGSPCNDFRGYCDVFMRCRLVDADGPLARLKKAIFSPELYENIAEWIVAHWWAVLLMGIALIMLMAGFIKICSVHTPSSNPKLPPPKPLPGTLKRRRPPQPIQQPQRQRPRESYQMGHMRR

SEQ ID NO: 331 - DNA, 1818 bp, Homo sapiens
gaactaagggaggcagggcttgtcttctctcctcagagcagagtctgcgatcttcccagcacagacgtttggacagagcaggctcctaaggtctccagaatgcccgtgccagcctcctggccccaccttcctagtcctttcctgctgatgacgctactgctggggagactcacaggagtggcaggtgaggacgagctacaggtgattcagcctgaaaagtccgtatcagttgcagctggagagtcggccactctgcgctgtgctatgacgtccctgatccctgtggggcccatcatgtggtttagaggagctggagcaggccgggaattaatctacaatcagaaagaaggccacttcccacgggtaacaactgtttcagaactcacaaagagaaacaacctggacttttccatcagcatcagtaacatcaccccagcagacgccggcacctactactgtgtgaagttccggaaagggagccctgacgacgtggagtttaagtctggagcaggcactgagctgtctgtgcgcgaagcagcgctggctcctactgctccactcctcgtagctctcctcctgggccccaagctgctactggtggttggtgtctctgccatctacatctgctggaaacagaaggcctgactgaccctcagtctctgctgcctcctcctttcttgagaagctcagcctgagagaaggagctggcgagaaccttccccacactcagctccaaacgcctcctctcccaggtcatctgcctgcccacacgctcctgttccaccttcacaagaccatgatgccccaaagcagtgtctctattcacggtcctgagcaggggccatgggattgggctctgggcactgactcatggcacctccctagaaggtgagaaacactccaaatctaaacacaccaggacttctcccatccgtcgccttgggactggccataaaccacagactctctccaggctctcaagagttatcctgtcttctggattcctgcctaccccaactcccccagccttgttgaggttctctactgcctcctgaatacacatgaacccctataccaattttaagaaaaaaatgattctctttcctctttgtccaagcatcctatccctcaaacccaaaaagaaagaagctctcccttctctctctgtgatggagacagtatttcttctagtatcctgcagccttcccagtcctgctgcttgtggtagaaatgctgccacagcccaacattgaggagccctcgatgactgccctttacaactcatattcagttctgcctccaaaatgcatgtgtccacttacatgagatggtaaatgtttaacaatggactttctgaaagggaaaaaccaaaagctgttttgcagtgcttgccaatttctctagtgtaataactcccaacctgaccaatttcacactgccaacagttaaacaaccagattgcaagattcctgaaatttaacaattggttttcagggcccagtccaagcctgctgctggaaacctcagagttaaatccctattctccacacctctcacctccaccacccctccctgtcccagccagcatcatctctttggggaccactcctctggctttcatttttcagccacagtgattctttggaaaagtcaaatcatatcacttctctgcttcttccccaacacagctgcatggctcccgctctccctccttcaagtctctgctcaatgtcacttcattaaaggcaccttctataaactaaaaaaaaaaaaaaaaaaaaaaaaaaaaaaaaaaaaaaaaaaaaaaaaaaaaaaaaa

SEQ ID NO: 332 - protein, 181 aa, Homo sapiens
MPVPASWPHLPSPFLLMTLLLGRLTGVAGEDELQVIQPEKSVSVAAGESATLRCAMTSLIPVGPIMWFRGAGAGRELIYNQKEGHFPRVTTVSELTKRNNLDFSISISNITPADAGTYYCVKFRKGSPDDVEFKSGAGTELSVREAALAPTAPLLVALLLGPKLLLVVGVSAIYICWKQKA

SEQ ID NO: 333 - DNA, 1855 bp, Homo sapiens
ctctgaagggagctactcagaagcgggagtctccgagagaagaaaagcaggtggaaggagaggaagcggatgccgtggggtttacagcaggaaaatccgtggagacagcagatccgagaagcggcgatgtttgcgtagaaccctgtacgtgcttccttcggcctgtcgctcttcccttctctctgaccagcaccatgcttctcctggtgacaagccttctgctctgtgagttaccacacccagcattcctcctgatcccagagaaatcggatctgcgaacagtggcaccagcctctagtctcaatgtgaggtttgactccaggacgatgaatttaagctgggactgccaagaaaacacaaccttcagcaagtgtttcttaactgacaagaagaacagagtcgtggaacccaggctcagtaacaacgaatgttcgtgcacatttcgtgaaatttgtctgcatgaaggagtcacatttgaggttcacgtgaatactagtcaaagaggatttcaacagaaactgctttatccaaattcaggaagggagggtaccgctgctcagaatttctcctgtttcatctacaatgcggatttaatgaactgtacctgggcgaggggtccgacggccccccgtgacgtccagtattttttgtacatacgaaactcaaagagaaggagggagatccggtgtccttattacatacaagactcaggaacccatgtgggatgtcacctggataacctgtcaggattaacgtctcgcaattactttctggttaacggaaccagccgagaaattggcatccaattctttgattcacttttggacacaaagaaaatagaacgattcaaccctcccagcaatgtcaccgtacgttgcaacacgacgcactgcctcgtacggtggaaacagcccaggacctatcagaagctgtcgtacctggactttcagtaccagctggacgtccacagaaagaatacccagcctggcacggaaaacctactgattaatgtttctggtgatttggaaaatagatacaactttccaagctctgagcccagagcaaaacacagtgtgaagatcagagctgcagacgtccgcatcttgaattggagctcctggagtgaagccattgaatttggttctgacgacgggaacctcggctctgtgtacatttatgtgctcctaatcgtgggaacccttgtctgtggcatcgtcctcggcttcctctttaaaaggttccttaggatacagcggctgttcccgccagttccacagatcaaagacaaactgaatgataaccatgaggtggaagacgagatcatctgggaggaattcaccccagaggaagggaaaggctaccgcgaagaggtcttgaccgtgaaggaaattacctgagacccagagggtgtaggaatggcatggacatctccgcctccgcgacacgggggaactgttttcttgatgatgctgtgaacctttatatcattttctatgtttttatttaaaaacatgacatttggggccaggcgcggtggctcacgcctgtaatcccagcactttgggaggccaaggcaggcggatcacctgaggtcaggagttcaagaccagcctgcccaacatggtgaaaccccatctggactaaaaatgcagaaatttacccaggcacggcggcggacgcccatcatcccagctacttgggaggctgaggcaggagaattgcttgaacccgtgaggcggaggttgtagtgagccaagatcgcaccattgcacaccaacctgcgtgacagagcaagattgcatctcaaaacaaacaataataataaataataaaaacctgatatttggctgggcaa

SEQ ID NO: 334 - protein, 400 aa, Homo sapiens
MLLLVTSLLLCELPHPAFLLIPEKSDLRTVAPASSLNVRFDSRTMNLSWDCQENTTFSKCFLTDKKNRVVEPRLSNNECSCTFREICLHEGVTFEVHVNTSQRGFQQKLLYPNSGREGTAAQNFSCFIYNADLMNCTWARGPTAPRDVQYFLYIRNSKRRREIRCPYYIQDSGTHVGCHLDNLSGLTSRNYFLVNGTSREIGIQFFDSLLDTKKIERFNPPSNVTVRCNTTHCLVRWKQPRTYQKLSYLDFQYQLDVHRKNTQPGTENLLINVSGDLENRYNFPSSEPRAKHSVKIRAADVRILNWSSWSEAIEFGSDDGNLGSVYIYVLLIVGTLVCGIVLGFLFKRFLRIQRLFPPVPQIKDKLNDNHEVEDEIIWEEFTPEEGKGYREEVLTVKEIT

SEQ ID NO: 335 - DNA, 7403 bp, Homo sapiens
tctgcttatcatggttaccaacaaaatgactgctgcctttagaaaccctagtgggaaacaggtggcgacagacaaagttgcagaaaagctgagctctactctctcatgggtgaagaacacagtatcgcatacagtcagtcagatggccagtcaggtggcaagtccatctacttcattacataccacatcctcatctaccacactatcaacaccagccctttcaccatcttccccatcacagttgagtccagacgacttagaactcctggctaaactggaagaacagaatagattgttagaaacggatagtaagtctttaagatctgtaaatgggtcaagaagaaacagtggctcttctcttgtgtcgagttcatcagcctctagcaacctcagtcaccttgaagaagattcttggattctttggggaagaattgttaatgaatgggaagatgtacgcaaaaagaaggaaaagcaagttaaggaacttgttcataaagggataccccatcactttagagcaatagtttggcaacttttatgcagtgcacaaagtatgccaattaaggatcagtattcagaactcctgaaaatgacctcgccttgtgaaaaattgatccgaagggacattgctagaacttaccctgaacacaacttttttaaggaaaaagatagccttggacaggaggttttatttaatgtaatgaaggcttactctttagtagatcgtgaggttggttactgtcaaggaagtgcttttatagttggattgttgcttatgcagatgccagaagaagaagctttctgtgtatttgttaaattaatgcaagattatagacttcgtgaactttttaaaccaagtatggcagaattgggcctttgtatgtaccagtttgaatgtatgatacaggagcatcttccagagctctttgtacattttcaatctcagagttttcatacctcaatgtatgcatcatcctggtttctgactatctttcttacaacttttccactaccaattgcaacaaggatatttgatatctttatgtctgagggtttagaaatagtgtttcgtgtaggattagcacttcttcagatgaatcaggcagaactgatgcaacttgacatggaagggatgttacagcactttcaaaaggtcattccacatcagtttgatggtgtcccagacaagctaatccaagcagcttaccaagtcaaatacaattcaaaaaaaatgaaaaagcttgaaaaggaatacactacaataaaaacgaaagaaatggaagagcaagttgaaattaaaaggttacgcacagaaaatagacttttaaaacagcgcatcgagacattagaaaaacataaatgcagttccaactacaacgaagattttgtgctacagctagagaaggaattggtccaagcccgactgagtgaagctgagtctcagtgtgcattaaaagagatgcaggataaagtcttggatatagagaagaggaataactcccttcctgatgagaataatattgcaaggcttcaggaagaactcattgctgtgaaacttagagaagcagaagccattatgggtttgaaagaacttagacagcaagtcaaggatttagaggaacactggcagcgccacttagctcgtactactgggagatggaaagacccacccaagaaaaatgctatgaatgagttacaagatgaactgatgaccattcgacttagagaagctgaaacacaagcagaaataagagaaataaaacaaaggatgatggaaatggaaacacagaaccagatcaatagtaaccatcttcgaagagcagaacaagaggtgattagcctacaggagaaagtgcagtatctttctgcacagaacaaaggactccttactcaattaagtgaagcaaagcgtaaacaagcagagattgaatgcaagaataaggaagaagtgatggctgtgaggcttcgggaagcagatagcatagctgctgtggctgaactacgacaacacattgctgagcttgaaatccagaaagaagaaggaaagcttcaaggacagcttaacaagtctgattctaaccagtatattggggaactgaaagatcagatagcagagctgaatcatgagctcaggtgcctaaaaggccagaggggcttctcaggccaacctccttttgatggaatccacattgtcaaccatttaataggagatgatgaatcattccattcctccgatgaagattttatagataattccttacaggaaactggtgttggttttcctttgcacggaaaatctggttcgatgtctttggaccccgcagtggcagatggtagtgagagcgaaacagaagacagtgtgctggagaccagagagagcaaccaagtggttcaaaaggagcggcccccgagaagaagagagtcgtattcaaccactgtctgaccatcactgtgacctagactatggatttatttaagggatcagttatcatatgattagggctttttggaaataatttgtttcatatgtacatatatatatatatatatatatatatatatatatatatatatatatatatatatattttacagtcttatctgcctttttatctttgccaaatctttaccactgatttaccattgccataaagtagactggtatatggttaatgtgtaaaacaaggttctaacagtattactgaatattaatgtttcttgtttagaaaatgcaactatatctatatgtgggaaccattctgaagttcaaaactatggaaaattgaattttcttcagacaaaactgctcttgtgcaatattttatgctcagtgagcaaattgtgtatttatgtttatcaatttgttctcaaggtggctgtctacagacatttgaccaagacatacatctgatttaccttgtgtttttttttttattgttgtttttttttttaagacagagattcagtctgtcacccaggctggagtgctgtggtgtgatcttagctcactgcaacctccgcctcccaggttcaagcaattttcctgcctcagcctcccgagtacctgggactatatgtgcgcaccaccacgcctggctaattttttgtatttttagtagagatggggtttcaccatgttggctgggctggtctcgaactcctaacctcaagtgatccacccgcctcagcctcccaaagtgctgggattacaggtgtgagccactgcacccagcctaccttgtctgtttgtgtctgggaggttttttttttctatttttattttttcatgaaaattattggtgggccactgaaagtccccacacacaaagcctttattctatataattttataaacacaaattcatgattatctgttttgagagttttaagttttgttttaatgtttaacttttatgtgcatatgatgcttccatgtgttggttactagagtagtaggttaactacagacatactgttttgtttgtacatatttataaatctgtaccacctaacattgaacatcattttatatgaagaacatacatgttgcaaaatgactgctttcagcatctaacaggacttctgtaaataataggttaaaagttaaaaataaaacactaatgttttaagagctttagtattttgcttagcattcaatactagcagattcataactgatgcctgttcaaaaacactgttggtggaatcttttatttcatgtgtatgtaactactaaatttttcatgactgaagaggttatagcacatattagttagtgctaatattctactgaatataatttaagcaatgggctaaggtccaagaaacatagcaattatatctacaaataatctattaacatgatcttcagaatctctagtttttgttctatagataaagccataagaatcctttcctaccagtttttcctatatcatttagatattatttcctagaaaacaggatgcctgtcactgataagttagagaaaacacccaaattatacttgcactatggaaagacgacatgaatatgttgactgggtactttctactctcatttttgttagcctatgaaaaaaaaaacattttgttaacctatggaaaaagccttggaagagaaaagtagaattcagtatgtatggaggcacagttttgcacagtatgttgcatgcggcaaaaaaaaaaatatgaaatagagtagaagagataaaagtagttttctgtcaaaaactaggagttaagccttcaggtacgttgtggactaggctttccagcaaggtttttgtagctatttgcttgcctgagaaatgaaattgaaaacatacccctgcgtgtctgtccttaacaccaggctaaattctggtggttaaataacttatctgtggttacaagctagtaagtagcagagccaagattttttttaatatagagacaggtgtctcactgtgttgtccaggctggtcttgaactcctggcctcaagtggtcctcctgcctcagcctcccaaagtgtggggattacaggtgcgagctactgctcccagcaagagccaagattttaacctagatctccctaacaccaaagcttttgaaagggttcagctgaagaatttctcaattctctgttttgttttgtttttatttttgttttttgagatgaagtctcactgcactcaggctggagtgcagtggtacgatcttggctcactgcaacctccacctcccgggttcaagcgattctcctgcctcagctcccaagtagctgggactacaggtgcacgccaccacaactggctaatttttgtatttttagtagagatggggtttcgctatgttggccaggctgatctcaaacttctgacctcaggtgatccacccactttgacctcccaaagtgctgggattactagacgtaagccaccacacctggcaattccctgcttttttgacaacataatttaaatgaatttgatttaaatgtttcctgaatatatatacagatagatagatgagtatcaacacttacaagctctacacagtctgtgagtgtagatactacttactcgtaggattgtcttgtgctttggggatttttgttcggagttctatactatcagcccagaaagctatcaatgtccaagtgaagtgagatgatgcatggccacattattgctttgaccctcacatcaagaaatctgaatgatctggaccaggggtcagcaaagtgcagcctacaagctattgcagtcagctgccagtttttacttttttaaatagttgggaaaaaaattccaaagactgatattttgtgtcacatgaaaattatatgaaattcaaattgcagtgtccataagtaaagttttattggggcacacccatgctcacccttttaaatattgtgtatggccgctttgtgctacagtagcagagttgagtcattgcaagggagaccatatggcccaggtagcctaaaatatttatctgatcctttacagaaaaagtttgctaacccttgataacagatactctaaaatgcaggtttttcttcttcaatttagctcagtggtaggtcaaattgtttgcttttgctattaagcttatgatttggaaacgtaaaatttcatggtggatattataatcagaactattcaaaagggaaaacatgccagccattttatatgatgaagtctcttattccatagaaaactgtagaaagatatctgtatctttggagaaggagaaagaaaggaaagaactccagaatcccatcactgttctttaaagcatgcatcacagacctttaagagtatgctttattgagtaaaggttatagtttgactttaagataagaaattttctagaatcatgtttgaattctaaacgttgatattcttaagtaccatttctgattaggaattaggtgttaaaagaatcatggtaaggaaaccttaatccgttgaaactcttgtaatttggacaacaaaaaactagaaataacactcttttctttgaagatctgattcaaatacaccttagaagagtttaaaatctcccaggcctttaggatgcaataggatattatgccttggtttgactccttttcattcaaattaatgtaagtatgttgttcaagactttgaagcattgaacaatgttctcgatgaattttatttaattactgacattttgtgatatttgaatgttattaagttaaacacttagagttgagtatattcaggggagaaaagtgaatgaaatgactcataataagaaagcttgctcccttgggacagttaccttcctggtgtcattgccatcctgggttgacaagctgagagtagaggatacaagtgatgtgaataaaatggaaattgcattgagttaatgaaacagacacttttagatcaagaaaacacttcaacagcctttttagaaattggcacactcctatagtcccacctactcaagaggctgaggcaggaggatcactagagtacaggagtttggggctgtagtgtgtaatgatcacacctgtgaaagaataaccactgcactccaacctgggcaacatggcaagaccctgtctctttaaaaaaaaaaaaaatcctgggaaaagaagtcaaagatgtaattttacacaatttctgcccccaccgtcttttttgtttgtttgtttgtttgtttgttttttggctagatactaggtattcagtgtttgctgagatgacaggtttctactaatcagccagttatttgggaaggagaaaaactttttctcaattctgaacatgatgcagcttgttaactctccagatagtgcctttgattgaaaataaggtctacacctttttaagtatattatttctgacatcgtaagaaataatttagttccttattctcatttatcttttatataatgtactgtaatattcaggtttaaagtaaaataagtatatgaattatattttggtaaaactgtttcatgaccagcttgattaatgtatattaacataccagacattgacagcgaacatttcatgaaatcagttatttacttaccaaaacaatgagttttagcttgaaagttactgctgctctattattaacaaaactaagttttaaaaattaattttaattctactgaagtttaatttctggttaaaggtatagtggatgctatttatgatccaagtttttacatcacatccattgatctgcctatcccttctttttactccaaagaggagatgatagaataatacattcagtatactaccaagaagcaaagttataatgtgtttcattttgctattggaattttttattgtaacattgtatgataacctgaaatgtttacttgtgccttttctttaaacaattaaagttttccattttataagaa

SEQ ID NO: 336 - protein, 810 aa, Homo sapiens
MVTNKMTAAFRNPSGKQVATDKVAEKLSSTLSWVKNTVSHTVSQMASQVASPSTSLHTTSSSTTLSTPALSPSSPSQLSPDDLELLAKLEEQNRLLETDSKSLRSVNGSRRNSGSSLVSSSSASSNLSHLEEDSWILWGRIVNEWEDVRKKKEKQVKELVHKGIPHHFRAIVWQLLCSAQSMPIKDQYSELLKMTSPCEKLIRRDIARTYPEHNFFKEKDSLGQEVLFNVMKAYSLVDREVGYCQGSAFIVGLLLMQMPEEEAFCVFVKLMQDYRLRELFKPSMAELGLCMYQFECMIQEHLPELFVHFQSQSFHTSMYASSWFLTIFLTTFPLPIATRIFDIFMSEGLEIVFRVGLALLQMNQAELMQLDMEGMLQHFQKVIPHQFDGVPDKLIQAAYQVKYNSKKMKKLEKEYTTIKTKEMEEQVEIKRLRTENRLLKQRIETLEKHKCSSNYNEDFVLQLEKELVQARLSEAESQCALKEMQDKVLDIEKRNNSLPDENNIARLQEELIAVKLREAEAIMGLKELRQQVKDLEEHWQRHLARTTGRWKDPPKKNAMNELQDELMTIRLREAETQAEIREIKQRMMEMETQNQINSNHLRRAEQEVISLQEKVQYLSAQNKGLLTQLSEAKRKQAEIECKNKEEVMAVRLREADSIAAVAELRQHIAELEIQKEEGKLQGQLNKSDSNQYIGELKDQIAELNHELRCLKGQRGFSGQPPFDGIHIVNHLIGDDESFHSSDEDFIDNSLQETGVGFPLHGKSGSMSLDPAVADGSESETEDSVLETRESNQVVQKERPPRRRESYSTTV

SEQ ID NO: 337 - DNA, 3657 bp, Homo sapiens
ggctggggggccgcgggcgggaggcggataaaaaggccccagggcgcccggggagggagcccgttagcgctgctccgccgcggcgcccgcccagccccggactgtccgcgctccatctggtatcttggcctcagctgtccttgaagtcaccatggcgtggtccccaccagccaccctctttctgttcctgctgctgctaggccagccccctcccagcaggccacagtcactgggcaccactaagctccggctggtgggcccagagagcaagccagaggagggccgcctggaggtgctgcaccagggccagtggggcaccgtgtgtgatgacaactttgctatccaggaggccacagtggcttgccgccagctgggcttcgaagctgccttgacctgggcccacagtgccaagtacggccaaggggagggacccatctggctggacaatgtgcgctgtgtgggcacagagagctccttggaccagtgcgggtctaatggctggggagtcagtgactgcagtcactcagaagacgtaggggtgatatgccacccccggcgccatcgtggctacctttctgaaactgtctccaatgcccttgggccccagggccggcggctggaggaggtgcggctcaagcccatccttgccagtgccaagcagcatagcccagtgaccgagggagccgtggaggtgaagtatgagggccactggcggcaggtgtgtgaccagggctggaccatgaacaacagcagggtggtgtgcgggatgctgggcttccccagcgaggtgcctgtcgacagccactactacaggaaagtctgggatctgaagatgagggaccctaagtctaggctgaagagcctgacgaataagaactccttctggatccaccaggtcacctgcctggggacagagccccacatggccaactgccaggtgcaggtggctccagcccggggcaagctgcggccagcctgcccaggtggcatgcacgctgtggtcagctgtgtggcagggcctcacttccgcccaccgaagacaaagccacaacgcaaagggtcctgggcagaggagccgagggtgcgcctgcgctccggggcccaggtgggcgagggccgggtggaagtgctcatgaaccgccagtggggcacggtctgtgaccacaggtggaacctcatctctgccagtgtcgtgtgtcgtcagctgggctttggctctgctcgggaggccctctttggggcccggctgggccaagggctagggcccatccacctgagtgaggtgcgctgcaggggatatgagcggaccctcagcgactgccctgccctggaagggtcccagaatggttgccaacatgagaatgatgctgctgtcaggtgcaatgtccctaacatgggctttcagaatcaggtgcgcttggctggtgggcgtatccctgaggaggggctattggaggtgcaggtggaggtgaacggggtcccacgctgggggagcgtgtgcagtgaaaactgggggctcaccgaagccatggtggcctgccgacagctcggcctgggttttgccatccatgcctacaaggaaacctggttctggtcggggacgccaagggcccaggaggtggtgatgagtggggtgcgctgctcaggcacagagctggccctgcagcagtgccagaggcacgggccggtgcactgctcccacggtggcgggcgcttcctggctggagtctcctgcatggacagtgcaccagacctggtgatgaacgcccagctagtgcaggagacggcctacttggaggaccgcccgctcagccagctgtattgtgcccacgaggagaactgcctctccaagtctgcggatcacatggactggccctacggataccgccgcctattgcgcttctccacacagatctacaatctgggccggactgactttcgtccaaagactggacgcgatagctgggtttggcaccagtgccacaggcattaccacagcattgaggtcttcacccactacgacctcctcactctcaatggctccaaggtggctgaggggcacaaggccagcttctgtctggaggacacaaactgccccacaggactgcagcggcgctacgcatgtgccaactttggagaacagggagtgactgtaggctgctgggacacctaccggcatgacattgattgccagtgggtggatatcacagatgtgggccccgggaattatatcttccaggtgattgtgaacccccactatgaagtggcagagtcagatttctccaacaatatgctgcagtgccgctgcaagtatgatgggcaccgggtctggctgcacaactgccacacagggaattcatacccagccaatgcagaactctccctggagcaggaacagcgtctcaggaacaacctcatctgaagctgtcactgcacactcctagctgctgccgatacaccagatacctcagcttattggagccatgcccttcacagagtcccaactcagaggaaaagggccagtgccaaggggcaccaagaacctgctcaggaagccttttgatggcaagatcaccaatccagatggtattgctccctcaggatggctctgggcctgcccctaagggcctgtggcctatggaatatgtcctccaggctttgctcagctgagctcctcttctgtaaggaaacccagtcatccctgaatcttgccacagagatccgggattcaggagctctcagtttcttagggatggactatggcccagtcccccatctaagtggtgctttgcaaatgtcttggaggagtataggacagaggaccaaaatacacagcaggtagtgttagctctctgctaggagctcaaagcaacacaacttgtatcaaaatcacaactggcagagaagctggtggatccaatcctttcttcatctgttgttatttagaactcacctctcacactctgttctttagtgtccttacctttatcttaccacacacatgggtgtttctattatccttggaagcacagacctcgggcatccccttattgcctgatgggccaacaccaacagttacggagtgcttgagaaggggcaagtttcacagaaatggccagatagggccttcctacagagcagcaagagtaggccaagcagaaagactgctgaggtaacacggaccccagcccctgtcagggcctctgccaaggaaataatatggaccatttacctggcaggcagtctgctctctctcaggatcaccacgcatctcaggattggtctaaacttcaagtctcaaccaagtgtctgaagtgaactttgcattgaataaatttttgccatggaaagaacatcaaacaagccactcatctctacagagataagaaaacaagtttggcagagcaagagacagaagaccgtggagaaatcagaagggggaacagtcagtttagttaaggatggaacctgggaaaggccaccattcctgcttgatggggctctgatttgctcttgctcaagtggaataaaaccccatggtcttcttgacatgattcttgatcttttctccactgagacacacttaagtgatgatccttacaggactgacaccctaatgccaataaaagttgctcattatggactgctacaaagacc

SEQ ID NO: 338 - protein, 756 aa, Homo sapiens
MAWSPPATLFLFLLLLGQPPPSRPQSLGTTKLRLVGPESKPEEGRLEVLHQGQWGTVCDDNFAIQEATVACRQLGFEAALTWAHSAKYGQGEGPIWLDNVRCVGTESSLDQCGSNGWGVSDCSHSEDVGVICHPRRHRGYLSETVSNALGPQGRRLEEVRLKPILASAKQHSPVTEGAVEVKYEGHWRQVCDQGWTMNNSRVVCGMLGFPSEVPVDSHYYRKVWDLKMRDPKSRLKSLTNKNSFWIHQVTCLGTEPHMANCQVQVAPARGKLRPACPGGMHAVVSCVAGPHFRPPKTKPQRKGSWAEEPRVRLRSGAQVGEGRVEVLMNRQWGTVCDHRWNLISASVVCRQLGFGSAREALFGARLGQGLGPIHLSEVRCRGYERTLSDCPALEGSQNGCQHENDAAVRCNVPNMGFQNQVRLAGGRIPEEGLLEVQVEVNGVPRWGSVCSENWGLTEAMVACRQLGLGFAIHAYKETWFWSGTPRAQEVVMSGVRCSGTELALQQCQRHGPVHCSHGGGRFLAGVSCMDSAPDLVMNAQLVQETAYLEDRPLSQLYCAHEENCLSKSADHMDWPYGYRRLLRFSTQIYNLGRTDFRPKTGRDSWVWHQCHRHYHSIEVFTHYDLLTLNGSKVAEGHKASFCLEDTNCPTGLQRRYACANFGEQGVTVGCWDTYRHDIDCQWVDITDVGPGNYIFQVIVNPHYEVAESDFSNNMLQCRCKYDGHRVWLHNCHTGNSYPANAELSLEQEQRLRNNLI

SEQ ID NO: 339 - DNA, 2488 bp, Homo sapiens
ggtagcccagccccgcgttcggctgctctcgaggaggccggagcccccggagacgatgcgccccgcgcagccgcctgcgcctgcgggagccggctgcccttgagatggagttgctgcctctttggctctgcctgggttttcacttcctgaccgtgggctggaggaacagaagcggaacagccacagcagcctcccaaggagtctgcaagttggtgggtggagccgctgactgccgagggcagagcctcgcttcggtgcccagcagcctcccgccccacgcccggatgctcaccctggatgccaaccctctcaagaccctgtggaatcactccctccagccttaccctctcctggagagcctcagcctgcacagctgccacctggagcgcatcagccgcggcgccttccaggagcaaggtcacctgcgcagcctggtactgggggacaactgcctctcagagaactacgaagagacggcagccgccctccacgccctgccgggcctgcggaggctggacttgtcaggaaacgccctgacggaggacatggcagcgctcatgctccagaacctctcctcgctgcggtccgtgtccctggcggggaacaccatcatgcggctggacgactccgtcttcgagggcctggagcgtctccgggagctggatctgcagaggaactacatcttcgagatcgagggcggcgctttcgacggcctggctgagctgaggcacctcaacctggccttcaacaacctcccctgcatcgtggacttcgggctcacgcggctgcgggtcctcaacgtcagctacaacgtcctggagtggttcctcgcgaccgggggagaggctgccttcgagctggagacgctggacctgtctcacaaccagctgctgttcttcccgctgctgccccagtacagcaagttgcggaccctcctgctgcgcgacaacaacatgggcttctaccgggacctgtacaacacctcgtcgccgagggagatggtggcccagttcctcctcgtggacggcaacgtgaccaacatcaccaccgtcagcctctgggaagaattctcctccagcgacctcgcagatctccgcttcctggacatgagccagaaccagttccagtacctgccagacggcttcctgaggaaaatgccttccctctcccacctgaacctccaccagaattgcctgatgacgcttcacattcgggagcacgagccccccggagcgctcaccgagctggacctgagccacaaccagctgtcggagctgcacctggctccggggctggccagctgcctgggcagcctgcgcttgttcaacctgagctccaaccagctcctgggcgtcccccctggcctcttcgccaatgctaggaacatcactacacttgacatgagccacaatcagatctcactttgtcccctgccagctgcctcggaccgggtgggcccccctagctgtgtggatttcaggaatatggcatctttaaggagcctgtctctggagggctgtggcctgggggcattgccagactgcccattccaagggacctccctgacctacttagacctctcaagcaactggggggttctgaatgggagcctcgccccactccaggatgttgcccccatgttacaggtcctgtctctcaggaacatgggcctccactccagctttatggcgttggacttctctgggtttgggaatctcagggacttagatctgtcggggaattgcttgaccaccttcccaaggtttgggggcagcctggccctggagaccctggatctccgtagaaactcgctcacagcccttccccagaaggctgtgtctgagcagctctcgagaggtctgcggaccatctacctcagtcagaatccatatgactgctgtggggtggatggctggggggccctgcagcatgggcagacggtggccgactgggccatggtcacctgcaacctctcctccaagatcatccgcgtgacggagctgcccggaggtgtgcctcgggactgcaagtgggagcggctggacctgggcctgctctacctcgtgctcatcctccccagctgcctcaccctgctggtggcctgcactgtcatcgtcctcacttttaagaagcctctgcttcaggtcatcaagagccgctgccactggtcctccgtttactgacctggctgtgtgccaagactcgaaattcggtccgcacacaacaggacactttctctgccagctttcaagatgtgatgcagaggccaagtctgacgaattgaagtttcaattaaaatttaatatgtttccattcctcatcgcccaccccacccccgcccccaccaccgcccaagttctttttccatcattataattcatccttattatcttggtaaaatatttattaagtgactttttcagaaataaaaggcaacgtgtctcataaatattttttaaattaaaaaaaaaaaaaaaaaaaaaaaaaa

SEQ ID NO: 340 - protein, 692 aa, Homo sapiens
MELLPLWLCLGFHFLTVGWRNRSGTATAASQGVCKLVGGAADCRGQSLASVPSSLPPHARMLTLDANPLKTLWNHSLQPYPLLESLSLHSCHLERISRGAFQEQGHLRSLVLGDNCLSENYEETAAALHALPGLRRLDLSGNALTEDMAALMLQNLSSLRSVSLAGNTIMRLDDSVFEGLERLRELDLQRNYIFEIEGGAFDGLAELRHLNLAFNNLPCIVDFGLTRLRVLNVSYNVLEWFLATGGEAAFELETLDLSHNQLLFFPLLPQYSKLRTLLLRDNNMGFYRDLYNTSSPREMVAQFLLVDGNVTNITTVSLWEEFSSSDLADLRFLDMSQNQFQYLPDGFLRKMPSLSHLNLHQNCLMTLHIREHEPPGALTELDLSHNQLSELHLAPGLASCLGSLRLFNLSSNQLLGVPPGLFANARNITTLDMSHNQISLCPLPAASDRVGPPSCVDFRNMASLRSLSLEGCGLGALPDCPFQGTSLTYLDLSSNWGVLNGSLAPLQDVAPMLQVLSLRNMGLHSSFMALDFSGFGNLRDLDLSGNCLTTFPRFGGSLALETLDLRRNSLTALPQKAVSEQLSRGLRTIYLSQNPYDCCGVDGWGALQHGQTVADWAMVTCNLSSKIIRVTELPGGVPRDCKWERLDLGLLYLVLILPSCLTLLVACTVIVLTFKKPLLQVIKSRCHWSSVY

We claim:

1. A method for detecting an endothelial progenitor cell (EPC) comprising determining the level of expression of a nucleic acid or protein set forth in Table 1, or a nucleic acid or a protein having at least about 70% identity thereto, in, on or secreted from a cell, wherein an increased level of expression of a nucleic acid or protein set forth in Table 1 or a nucleic acid or protein having at least about 70% identity thereto compared to another cell type is indicative of an EPC.

2. A method according to claim 1, wherein the nucleic acid or protein is expressed in, on or secreted from EPCs at a level at least 1.5 fold greater or 2 fold greater or 3 fold greater or 4 fold greater or 5 fold greater than in, on or secreted by human umbilical cord vascular endothelial cells (HUVECs).

3. A method according to claim 2, wherein the nucleic acid or protein is expressed in, on or secreted by non-adherent CD133⁺ EPCs at a level at least 1.5 fold greater or 2 fold greater or 3 fold greater or 4 fold greater or 5 fold greater than in, on or secreted by HUVECs.

4. A method for detecting an endothelial progenitor cell (EPC) comprising determining the level of expression of a protein that is a cell adhesion molecule or a nucleic acid encoding the protein as set forth in Table 2, or a nucleic acid or protein having at least about 70% identity thereto, in, on or secreted from a cell, wherein an increased level of expression of a nucleic acid or protein set forth in Table 2 or a nucleic acid or protein having at least about 70% identity thereto compared to another cell type is indicative of an EPC.

5. A method for detecting an endothelial progenitor cell (EPC) comprising determining the level of expression of a transporter protein or a nucleic acid encoding the protein as set forth in Table 3, or a nucleic acid or protein having at least about 70% identity thereto, in, on or secreted from a cell, wherein an increased level of expression of a nucleic acid or protein set forth in Table 3 or a nucleic acid or protein having at least about 70% identity thereto compared to another cell type is indicative of an EPC.

6. A method for detecting an endothelial progenitor cell (EPC) comprising determining the level of expression of a growth factor protein or a nucleic acid encoding the protein as set forth in Table 4, or a nucleic acid or protein having at least about 70% identity thereto, in, on or secreted from a cell, wherein an increased level of expression of a nucleic acid or protein set forth in Table 4 or a nucleic acid or protein having at least about 70% identity thereto compared to another cell type is indicative of an EPC.

7. A method for detecting an endothelial progenitor cell (EPC) comprising determining the level of expression of a receptor protein or a nucleic acid encoding the protein as set forth in Table 5, or a nucleic acid or protein having at least about 70% identity thereto, in, on or secreted from a cell, wherein an increased level of expression of a nucleic acid or protein set forth in Table 5 or a nucleic acid or protein having at least about 70% identity thereto compared to another cell type is indicative of an EPC.

8. A method for detecting an endothelial progenitor cell (EPC) comprising determining the level of expression of an enzyme protein or a nucleic acid encoding the protein as set forth in Table 6, or a nucleic acid or protein having at least about 70% identity thereto, in, on or secreted from a cell, wherein an increased level of expression of a nucleic acid or protein set forth in Table 6 or a nucleic acid or protein having at least about 70% identity thereto compared to another cell type is indicative of an EPC.

9. A method according to any one of claims 1 to 8, wherein the protein is selected from the group consisting of DSG2, EMR2, EMB, ADCY7, SLC39A8, TM7SF3, NKG7, NCSTN, SIRBP1, EVI5, LOXL4, INSRR, PKD2L1, DPP6, LRRC33 and SCL1A5 or the nucleic acid encodes one of the foregoing proteins.

10. A method according to any one of claims 1 to 9, wherein the protein is a cell surface protein in or on an EPC.

11. A method for isolating an endothelial progenitor cell (EPC), the method comprising detecting an EPC by performing the method according to any one of claims 1 to 10 and isolating the detected EPC.

12. A method for isolating a population of cells enriched for endothelial progenitor cells (EPCs), the method comprising contacting a population of cells comprising EPCs with a compound that binds to a protein set forth in Table 1 or a protein having at least about 70% identity thereto for a time and under conditions sufficient for the compound to bind to a cell and isolating cells to which the compound is bound.

13. A method according to claim 11 or 12, additionally comprising culturing the isolated cells to increase the number of isolated EPCs and/or differentiating the isolated and/or cultured EPCs.

14. A method according to any one of claims 11 to 13, additionally comprising determining the activity of the isolated and/or cultured EPCs.

15. A method according to any one of claims 11 to 14, additionally comprising formulating the isolated EPCs and/or cells isolated therefrom with a pharmaceutically acceptable carrier or excipient to thereby produce a pharmaceutical composition.

16. A method according to any one of claims 11 to 15, additionally comprising immobilizing the isolated EPCs and/or cells derived therefrom on a solid or semi-solid matrix.

17. A composition comprising a population of cells enriched for endothelial progenitor cells (EPCs), wherein the population is isolated by performing a method according to any one of claims 11 to 16.

18. A composition comprising a population of cells enriched for endothelial progenitor cells (EPCs) expressing one or more nucleic acids or proteins set forth in Table 1.

19. A composition according to claim 17 or 18, wherein the population of cells is enriched for EPCs expressing one or more proteins selected from the group consisting of DSG2, EMR2, EMB, ADCY7, SLC39A8, TM7SF3, NKG7, NCSTN, SIRBP1, EVI5, LOXL4, INSRR, PKD2L1, DPP6, LRRC33 and SCL1A5.

20. A composition according to any one of claims 17 to 19, wherein the EPCs additionally express one or more proteins selected from the group consisting of CD133, CD117, CD34 CD144, VEGFR2 and CD31.

21. A method for diagnosing and/or prognosing an endothelial progenitor cell (EPC)-associated condition in a subject, the method comprising performing the method according to any one of claims 1 to 10 to detect an EPC in a sample from a subject and/or performing the method of claim 14 to determine the activity of an EPC from a subject wherein detection of EPC(s) and/or EPC activity or failure to detect EPCs and/or EPC activity is diagnostic or prognostic of the EPC-associated condition.

22. A method for localising and/or detecting and/or diagnosing and/or prognosing an endothelial progenitor cell (EPC)-associated condition in a subject, the method comprising:
(i) administering to a subject a compound that binds specifically to a compound that binds to a protein set forth in Table 1 such that the compound binds to the protein, if present; and
(ii) detecting the compound bound to the protein in vivo, wherein detection of the bound compound localises and/or detects and/or diagnoses and/or prognoses the EPC-associated condition.

23. A method of treating or preventing a condition associated with reduced endothelial progenitor cell (EPC) numbers or activity, treating or preventing a condition associated with insufficient neovascularization and/or improving grafting and/or improving wound healing in a subject, the method comprising administering the composition according to any one of claims 17 to 20 or:
(i) isolating a population enriched for EPCs by performing the method according to any one of claims 11 to 16; and
(ii) administering the cells at (i) to the subject.

24. A method of treating or preventing a condition associated with reduced EPC numbers or activity and/or treating or preventing a condition associated with insufficient neovascularization and/or improving grafting and/or improving wound healing in a subject, the method comprising administering to a subject in need thereof a solid support or a semi-solid support having immobilized thereon a compound that binds to a protein set forth in Table 1 for a time and under conditions for the compound to bind to EPCs from the subject.

25. A method of modulating neovascularization and/or EPC numbers or activity in a subject, the method comprising administering to a subject in need thereof a compound that modulates expression and/or activity of a protein or nucleic acid set forth in Table 1, and/or administering a compound that binds to a protein set forth in Table 1 and modulates EPC activity and/or induces EPC death and/or EPC proliferation.

26. An isolated antibody or polypeptide that binds specifically to a protein set forth in Table 1 or an immunogenic fragment or epitope thereof, or a polypeptide comprising antigen binding domain of an antibody that binds specifically to a protein set forth in Table 1 or an immunogenic fragment or epitope thereof when used in a method according to any one of claims 1 to 16 or 21 to 25.

27. Use of an isolated antibody or polypeptide that binds specifically to a protein set forth in Table 1 or an immunogenic fragment or epitope thereof, or a polypeptide comprising antigen binding domain of an antibody that binds specifically to a protein set forth in Table 1 or an immunogenic fragment or epitope thereof in the manufacture of a medicament for treating, diagnosing, prognosing or preventing an EPC-associated condition.

28. The method of any one of claim 21 or 25 or the use of claim 27, wherein the condition is selected from the group consisting of cardiovascular disease, diabetes or melanoma.

29. The method of claim 23 or 24, wherein the condition is cardiovascular disease or diabetes.
